(19) United States
(12) Patent Application Publication
(10) Pub. No.: US 2018/0273587 A1
(43) Pub. Date: Sep. 27, 2018

(54) WARHEAD-CONTAINING PEPTIDOMIMETIC MACROCYCLES AS MODULATORS OF BFL-1

(71) Applicant: AILERON Therapeutics, Inc., Cambridge, MA (US)

(72) Inventor: Vincent Guerlavais, Arlington, MA (US)

(21) Appl. No.: 15/917,054

(22) Filed: Mar. 9, 2018

Related U.S. Application Data
(60) Provisional application No. 62/477,741, filed on Mar. 28, 2017.
(60) Provisional application No. 62/473,721, filed on Mar. 20, 2017.
(60) Provisional application No. 62/496,460, filed on Oct. 14, 2016.

(51) Int. Cl. C07K 14/00

(52) U.S. Cl. CPC C07K 14/001

(57) ABSTRACT

The disclosed peptidomimetic macrocycles modulate the activity of BFL-1 or a BCL-2 family protein. BFL-1, an anti-apoptotic BCL-2 family member, blocks p53-mediated apoptosis and has oncogenic transforming activity. Peptidomimetic macrocycles, pharmaceutical compositions, and methods disclosed herein can be used for the treatment of disease in which BFL-1 or a BCL-2 family protein is over-expressed, such as cancer. In particular, BFL-1-modulating or a BCL-2 family protein-modulating peptidomimetic macrocycles disclosed herein can be applied in the setting of resistance to BCL-2 family inhibitors, which is often engendered by BFL-1 or BCL-2 family protein over-expression or hyper-activation.

### CROSS REFERENCE

[0001] This Application claims the benefit of U.S. Provisional Application No. 62/469,460, filed Mar. 9, 2017; U.S. Provisional Application No. 62/473,721, filed Mar. 20, 2017; and U.S. Provisional Application No. 62/477,741, filed Mar. 28, 2017, which are incorporated herein by reference in their entirety.

### SEQUENCE LISTING

[0002] The instant application contains a Sequence Listing which has been submitted electronically in ASCII format and is hereby incorporated by reference in its entirety. Said ASCII copy, created on Mar. 27, 2018, is named 35224-820_201_SL.txt and is 1,594,927 bytes in size.

### BACKGROUND OF THE INVENTION

[0003] Myeloid cell leukemia 1 (MCL-1) is a protein that inhibits cell death by binding and inhibiting pro-death factors, such as BCL-2 interacting mediator (BIM). BFL-1, an anti-apoptotic BCL-2 family member, blocks p53-mediated apoptosis and has oncogenic transforming activity.

### INCORPORATION BY REFERENCE

[0004] All publications, patents, and patent applications mentioned in this specification are herein incorporated by reference in their entirety for all purposes, to the same extent as if each individual publication, patent, or patent application was specifically and individually indicated to be incorporated by reference.

### SUMMARY OF THE INVENTION

[0005] In some embodiments, the invention provides a peptidomimetic macrocycle of Formula (Ic):

[chemical structure]

wherein:

[0006] each A, C, D, E, and F is independently a natural or non-natural amino acid;

[0007] each B is independently a natural or non-natural amino acid, amino acid analogue,

[chemical structure]

[—NH-L₃-CO—], [—NH-L₃-SO₂—], or [—NH-L₃-];

[0008] WH is an amino acid with an electron accepting group susceptible to attack by a nucleophile;

[0009] each L is independently a macrocycle-forming linker;

[0010] each L′ is independently alkylene, alkenylene, alkynylene, heteroalkylene, cycloalkylene, heterocycloalkylene, arylene, or heteroarylene, each being optionally substituted with R₅, or a bond, or together with R₁ and the atom to which both R₁ and L″ are bound forms a ring;

[0011] each L″ is independently alkylene, alkenylene, alkynylene, heteroalkylene, cycloalkylene, heterocycloalkylene, arylene, or heteroarylene, each being optionally substituted with R₅, or a bond, or together with R₂ and the atom to which both R₂ and L″ are bound forms a ring;

[0012] each R₁ is independently —H, alkyl, alkenyl, alkynyl, arylalkyl, cycloalkyl, cycloalkylalkyl, heteroalkyl, or heterocycloalkyl, each being optionally substituted with halo-, or together with L′ and the atom to which both R₁ and L′ are bound forms a ring;

[0013] each R₂ is independently —H, alkyl, alkenyl, alkynyl, arylalkyl, cycloalkyl, cycloalkylalkyl, heteroalkyl, or heterocycloalkyl, each being optionally substituted with halo-, or together with L″ and the atom to which both R₂ and L″ are bound forms a ring;

[0014] each R₃ is independently —H, alkyl, alkenyl, alkynyl, arylalkyl, heteroalkyl, cycloalkyl, heterocycloalkyl, cycloalkylalkyl, aryl, or heteroaryl, each being optionally substituted with R₅;

[0015] each L₃ is independently alkylene, alkenylene, alkynylene, heteroalkylene, cycloalkylene, heterocycloalkylene, arylene, heteroarylene, or [—R₄—K—R₄-]ₙ, each being optionally substituted with R₅;

[0016] each R₄ is independently alkylene, alkenylene, alkynylene, heteroalkylene, cycloalkylene, heterocycloalkylene, arylene, or heteroarylene;

[0017] each K is independently O, S, SO, SO₂, CO, CO₂, or CONR₃;

[0018] each n is independently 1, 2, 3, 4, or 5;

[0019] each R₅ is independently halogen, alkyl, —OR₆, —N(R₆)₂, —SR₆, —SOR₆, —SO₂R₆, —CO₂R₆, a fluorescent moiety, a radioisotope, or a therapeutic agent;

[0020] each R₆ is independently —H, alkyl, alkenyl, alkynyl, arylalkyl, cycloalkylalkyl, heterocycloalkyl, a fluorescent moiety, a radioisotope, or a therapeutic agent;

[0021] each R₇ is independently —H, alkyl, alkenyl, alkynyl, arylalkyl, cycloalkyl, heteroalkyl, cycloalkylalkyl, heterocycloalkyl, aryl, or heteroaryl, each being optionally substituted with R₅, or part of a cyclic structure with a D residue;

[0022] each R₈ is independently —H, alkyl, alkenyl, alkynyl, arylalkyl, cycloalkyl, heteroalkyl, cycloalkylalkyl, heterocycloalkyl, aryl, or heteroaryl, each being optionally substituted with R₅, or part of a cyclic structure with an E residue;

[0023] each v and w is independently an integer from 1-1000;

[0024] t is 0;

[0025] u is 1, 2, 3, 4, 5, 6, 7, 8, 9, or 10; and

[0026] each x, y and z is independently 0, 1, 2, 3, 4, 5, 6, 7, 8, 9, or 10, or

a pharmaceutically-acceptable salt thereof.

### BRIEF DESCRIPTION OF THE DRAWINGS

[0027] FIG. 1 illustrates cell viability over time after treatment with a peptidomimetic macrocycle.

[0028] FIG. 2 illustrates cell viability over time after treatment with a peptidomimetic macrocycle.

[0029] FIG. 3 illustrates cell viability over time after treatment with a peptidomimetic macrocycle.

[0030] FIG. 4 illustrates cell viability over time after treatment with a peptidomimetic macrocycle.

[0031] FIG. 5 illustrates normalized fluorescence resonance energy transfer (FRET) signal after treatment with vehicle, a peptidomimetic macrocycle, or a BH3 mimetic.

[0032] FIG. 6 illustrates concentration of a peptidomimetic macrocycle in tissue over time after treatment.

[0033] FIG. 7 illustrates percentage remaining of a peptidomimetic macrocycle in plasma over time after treatment.

[0034] FIG. 8 illustrates results after A375-P cells were treated with BIM SAHB_{A1} or Aileron peptide 1 (40 μM).

[0035] FIG. 9 illustrates results after SK-MEL-2 cells were treated with BIM SAHB_{A1} or Aileron peptide 1 (40 μM).

[0036] FIG. 10 illustrates results after SK-MEL-28 cells were treated with BIM SAHB_{A1} or Aileron peptide 1 (40 μM).

[0037] FIG. 11 illustrates results after A375-P cells were treated with Aileron peptide 2 or Aileron peptide 3 (40 μM).

[0038] FIG. 12 illustrates results after SK-MEL-2 cells were treated with Aileron peptide 2 or Aileron peptide 3 (40 μM).

[0039] FIG. 13 illustrates results after SK-MEL-28 cells were treated with Aileron peptide 2 or Aileron peptide 3 (40 μM).

[0040] FIG. 14 illustrates how a stapled peptide derived from BIM broadly targets BCL-2 family proteins, neutralizes BIM's prosurvival relatives, and directly activates BAX.

[0041] FIG. 15 illustrates how a BH3-only protein (BIM) can directly activate mitochondrial BAK and cytosolic BAX, and inhibit the capacity of anti-apoptotic proteins to sequester activate forms of BAK and BAX, leading the inactive monomers of BAK and BAX to transform to toxic pore-forming proteins.

[0042] FIG. 16 compares high resolution X-ray structures of: a stapled BIM peptide bound to MCL-1; Noxa BH3 bound to MCL-1; and BIM BH3 bound to MCL-1.

[0043] FIG. 17 shows a 2 angstrom X-ray structure of a stapled BIM-BH3 peptide bound to MCL-1.

[0044] FIG. 18 illustrates how stapled BIM peptides of the disclosure can disrupt the formation of MCL-1/BAK complexes in living cells.

[0045] FIG. 19 compares normalized FRET signals of samples to determine the samples' effects in disrupting MCL-1/BAK protein-protein interactions.

[0046] FIG. 20 shows that cross-linked peptide #16 exhibited on-mechanism cytotoxic activity against BAX-BAK^{wt/wt} MEF cells but did not exhibit on-mechanism cytotoxic activity in BAX-BAK^{-/-} double knock outs (DKO).

[0047] FIG. 21 shows that treatment of A375-P (1), SK-MEL-2 (2), and SK-MEL-28 (3) with peptide #16 induced higher levels of caspase-3/7 activation than the BIM SAHB_{A1} control.

[0048] FIG. 22 shows that treatment of A375-P (1), SK-MEL-2 (2), and SK-MEL-28 (3) with peptide #16 decreased the % viability of the cells, while treatment with BIM SAHB_{A1} had no effect on % viability.

[0049] FIG. 23 shows that peptide #16 was ten times more potent than BIM SAHB_{A1} in the MCL-1-1 driven Raji cell line.

[0050] FIG. 24 shows that Raji cell proliferation (fraction of control) decreased with increasing doses of peptide #16 in a dose-dependent manner.

[0051] FIG. 25 shows that Raji cell proliferation (fraction of control) decreased with increasing doses of ABT-199 in a dose-dependent manner.

[0052] FIG. 26 shows that the combination index (CI) of the combination study had additive to synergistic complementary effects.

### DETAILED DESCRIPTION OF THE INVENTION

[0053] The terminology used herein is for the purpose of describing particular cases only and is not intended to be limiting. As used herein, the singular forms “a”, “an” and “the” are intended to include the plural forms as well, unless the context clearly indicates otherwise. Furthermore, to the extent that the terms “including”, “includes”, “having”, “has”, “with”, or variants thereof are used in either the detailed description or the claims, such terms are intended to be inclusive in a manner similar to the term “comprising”.

[0054] The term “about” or “approximately” can mean within an acceptable error range for the particular value as determined by one of ordinary skill in the art, which will depend in part on how the value is measured or determined, i.e., the limitations of the measurement system. For example, “about” can mean within 1 or more than 1 standard deviation, per the practice in the art. Alternatively, “about” can mean a range of up to 20%, up to 10%, up to 5%, or up to 1% of a given value. Alternatively, particularly with respect to biological systems or processes, the term can mean within an order of magnitude, within 5-fold, and more preferably within 2-fold, of a value. Where particular values are described in the application and claims, unless otherwise stated the term “about” meaning within an acceptable error range for the particular value should be assumed. The term “about” has the meaning as commonly understood by one of ordinary skill in the art. In some embodiments, the term “about” refers to ±10%. In some embodiments, the term “about” refers to ±5%.

[0055] As used herein, the term “macrocycle” refers to a molecule having a chemical structure including a ring or cycle formed by at least 9 covalently bonded atoms.

[0056] As used herein, the term “peptidomimetic macrocycle” or “crosslinked polypeptide” refers to a compound comprising a plurality of amino acid residues joined by a plurality of peptide bonds and at least one macrocycle-forming linker which forms a macrocycle between a first naturally-occurring or non-naturally-occurring amino acid residue (or analogue) and a second naturally-occurring or non-naturally-occurring amino acid residue (or analogue) within the same molecule. Peptidomimetic macrocycles include embodiments where the macrocycle-forming linker connects the α carbon of the first amino acid residue (or analogue) to the α carbon of the second amino acid residue (or analogue). The peptidomimetic macrocycles optionally include one or more non-peptide bonds between one or more amino acid residues or amino acid analogue residues, and optionally include one or more non-naturally-occurring amino acid residues or amino acid analogue residues in addition to any which form the macrocycle. A “corresponding uncrosslinked polypeptide” when referred to in the context of a peptidomimetic macrocycle is understood to relate to a polypeptide of the same length as the macrocycle and comprising the equivalent natural amino acids of the wild-type sequence corresponding to the macrocycle.

[0057] As used herein, the term “stability” refers to the maintenance of a defined secondary structure in solution by a peptidomimetic macrocycle of the invention as measured by circular dichroism, NMR or another biophysical measure, or resistance to proteolytic degradation in vitro or in vivo. Non-limiting examples of secondary structures contemplated in this invention are α-helices, 3₁₀ helices, β-turns, and β-pleated sheets.

[0058] As used herein, the term “helical stability” refers to the maintenance of a helical structure by a peptidomimetic macrocycle of the invention as measured by circular dichroism or NMR. For example, in some embodiments, the peptidomimetic macrocycles of the invention exhibit at least a 1.25, 1.5, 1.75 or 2-fold increase in α-helicity as determined by circular dichroism compared to a corresponding uncrosslinked macrocycle.

[0059] The term “amino acid” refers to a molecule containing both an amino group and a carboxyl group. Suitable amino acids include, without limitation, both the D- and L-isomers of the naturally-occurring amino acids, as well as non-naturally occurring amino acids prepared by organic synthesis or other metabolic routes. The term amino acid, as used herein, includes without limitation, α-amino acids, natural amino acids, non-natural amino acids, and amino acid analogues.

[0060] The term “α-amino acid” refers to a molecule containing both an amino group and a carboxyl group bound to a carbon which is designated the α-carbon.

[0061] The term “β-amino acid” refers to a molecule containing both an amino group and a carboxyl group in a β configuration. The abbreviation “b-” prior to an amino acid represent a beta configuration for the amino acid.

[0062] The term “naturally occurring amino acid” refers to any one of the twenty amino acids commonly found in peptides synthesized in nature, and known by the one letter abbreviations A, R, N, C, D, Q, E, G, H, I, L, K, M, F, P, S, T, W, Y and V.

[0063] The following Table shows a summary of the properties of natural amino acids:

| | | | | Side- | |
|---|---|---|---|---|---|
| | 3- | 1- | Side- | chain | |
| | Letter | Letter | chain | charge | Hydropathy |
| Amino Acid | Code | Code | Polarity | (pH 7.4) | Index |
| Alanine | Ala | A | nonpolar | neutral | 1.8 |
| Arginine | Arg | R | polar | positive | −4.5 |
| Asparagine | Asn | N | polar | neutral | −3.5 |
| Aspartie acid | Asp | D | polar | negative | −3.5 |
| Cysteine | Cys | C | polar | neutral | 2.5 |
| Glutamic acid | Glu | E | polar | negative | −3.5 |
| Glutamine | Gln | Q | polar | neutral | −3.5 |
| Glycine | Gly | G | nonpolar | neutral | −0.4 |
| Histidine | His | H | polar | positive(10%) | −3.2 |
| | | | | neutral(90%) | |
| Isoleucine | Ile | I | nonpolar | neutral | 4.5 |
| Leucine | Leu | L | nonpolar | neutral | 3.8 |
| Lysine | Lys | K | polar | positive | −3.9 |
| Methionine | Met | M | nonpolar | neutral | 1.9 |
| Phenylalanine | Phe | F | nonpolar | neutral | 2.8 |
| Proline | Pro | P | nonpolar | neutral | −1.6 |
| Serine | Ser | S | polar | neutral | −0.8 |
| Threonine | Thr | T | polar | neutral | −0.7 |
| Tryptophan | Trp | W | nonpolar | neutral | −0.9 |
| Tyrosine | Tyr | Y | polar | neutral | −1.3 |
| Valine | Val | V | nonpolar | neutral | 4.2 |

[0064] “Hydrophobic amino acids” include small hydrophobic amino acids and large hydrophobic amino acids. “Small hydrophobic amino acids” are glycine, alanine, proline, and analogues thereof. “Large hydrophobic amino acids” are valine, leucine, isoleucine, phenylalanine, methionine, tryptophan, tyrosine, and analogues thereof. “Polar amino acids” are serine, threonine, asparagine, glutamine, cysteine, and analogues thereof. “Charged amino acids” include positively charged amino acids and negatively charged amino acids. “Positively charged amino acids” include lysine, arginine, histidine, and analogues thereof. “Negatively charged amino acids” include aspartate, glutamate, and analogues thereof.

[0065] The term “amino acid analogue” refers to a molecule which is structurally similar to an amino acid and which can be substituted for an amino acid in the formation of a peptidomimetic macrocycle. Amino acid analogues include, without limitation, β-amino acids and amino acids where the amino or carboxy group is substituted by a similarly reactive group (e.g., substitution of the primary amine with a secondary or tertiary amine, or substitution of the carboxy group with an ester).

[0066] The term “non-natural amino acid” refers to an amino acid which is not one of the twenty amino acids commonly found in peptides synthesized in nature, and known by the one letter abbreviations A, R, N, C, D, Q, E, G, H, I, L, K, M, F, P, S, T, W, Y and V. Non-natural amino acids or amino acid analogues include, without limitation, structures according to the following:

[chemical structure]

[chemical structure]

[chemical structure]

[chemical structure]

[chemical structure]

[chemical structure]

[chemical structure]

[chemical structure]

[chemical structure]

[chemical structure]

[0067] Amino acid analogues include β-amino acid analogues. Examples of β-amino acid analogues include, but are not limited to, the following: cyclic β-amino acid analogues; β-alanine; (R)-β-phenylalanine; (R)-1,2,3,4-tetrahydro-isoquinoline-3-acetic acid; (R)-3-amino-4-(1-naphthyl)-butyric acid; (R)-3-amino-4-(2,4-dichlorophenyl)butyric acid; (R)-3-amino-4-(2-chlorophenyl)-butyric acid; (R)-3-amino-4-(2-cyanophenyl)-butyric acid; (R)-3-amino-4-(2-fluorophenyl)-butyric acid; (R)-3-amino-4-(2-furyl)-butyric acid; (R)-3-amino-4-(2-methylphenyl)-butyric acid; (R)-3-amino-4-(2-naphthyl)-butyric acid; (R)-3-amino-4-(2-thienyl)-butyric acid; (R)-3-amino-4-(2-trifluoromethylphenyl)-butyric acid; (R)-3-amino-4-(3,4-dichlorophenyl)butyric acid; (R)-3-amino-4-(3,4-difluorophenyl)butyric acid; (R)-3-amino-4-(3-benzothienyl)-butyric acid; (R)-3-amino-4-(3-chlorophenyl)-butyric acid; (R)-3-amino-4-(3-cyanophenyl)-butyric acid; (R)-3-amino-4-(3-fluorophenyl)-butyric acid; (R)-3-amino-4-(3-methylphenyl)-butyric acid; (R)-3-amino-4-(3-pyridyl)-butyric acid; (R)-3-amino-4-(3-thienyl)-butyric acid; (R)-3-amino-4-(3-trifluoromethylphenyl)-butyric acid; (R)-3-amino-4-(4-bromophenyl)-butyric acid; (R)-3-amino-4-(4-chlorophenyl)-butyric acid; (R)-3-amino-4-(4-cyanophenyl)-butyric acid; (R)-3-amino-4-(4-fluorophenyl)-butyric acid; (R)-3-amino-4-(4-iodophenyl)-butyric acid; (R)-3-amino-4-(4-methylphenyl)-butyric acid; (R)-3-amino-4-(4-nitrophenyl)-butyric acid; (R)-3-amino-4-(4-pyridyl)-butyric acid; (R)-3-amino-4-(4-trifluoromethylphenyl)-butyric acid; (R)-3-amino-4-pentafluoro-phenylbutyric acid; (R)-3-amino-5-hexenoic acid; (R)-3-amino-5-hexynoic acid; (R)-3-amino-5-phenylpentanoic acid; (R)-3-amino-6-phenyl-5-hexenoic acid; (S)-1,2,3,4-tetrahydro-isoquinoline-3-acetic acid; (S)-3-amino-4-(1-naphthyl)-butyric acid; (S)-3-amino-4-(2,4-dichlorophenyl)butyric acid; (S)-3-amino-4-(2-chlorophenyl)-butyric acid; (S)-3-amino-4-(2-cyanophenyl)-butyric acid; (S)-3-amino-4-(2-fluorophenyl)-butyric acid; (S)-3-amino-4-(2-furyl)-butyric acid; (S)-3-amino-4-(2-methylphenyl)-butyric acid; (S)-3-amino-4-(2-naphthyl)-butyric acid; (S)-3-amino-4-(2-thienyl)-butyric acid; (S)-3-amino-4-(2-trifluoromethylphenyl)-butyric acid; (S)-3-amino-4-(3,4-dichlorophenyl)butyric acid; (S)-3-amino-4-(3,4-difluorophenyl)butyric acid; (S)-3-amino-4-(3-benzothienyl)-butyric acid; (S)-3-amino-4-(3-chlorophenyl)-butyric acid; (S)-3-amino-4-(3-cyanophenyl)-butyric acid; (S)-3-amino-4-(3-fluorophenyl)-butyric acid; (S)-3-amino-4-(3-methylphenyl)-butyric acid; (S)-3-amino-4-(3-pyridyl)-butyric acid; (S)-3-amino-4-(3-thienyl)-butyric acid; (S)-3-amino-4-(3-trifluoromethylphenyl)-butyric acid; (S)-3-amino-4-(4-bromophenyl)-butyric acid; (S)-3-amino-4-(4-chlorophenyl)-butyric acid; (S)-3-amino-4-(4-cyanophenyl)-butyric acid; (S)-3-amino-4-(4-fluorophenyl)-butyric acid; (S)-3-amino-4-(4-iodophenyl)-butyric acid; (S)-3-amino-4-(4-methylphenyl)-butyric acid; (S)-3-amino-4-(4-nitrophenyl)-butyric acid; (S)-3-amino-4-(4-pyridyl)-butyric acid; (S)-3-amino-4-(4-trifluoromethylphenyl)-butyric acid; (S)-3-amino-4-pentafluoro-phenylbutyric acid; (S)-3-amino-5-hexenoic acid; (S)-3-amino-5-hexynoic acid; (S)-3-amino-5-phenylpentanoic acid; (S)-3-amino-6-phenyl-5-hexenoic acid; 1,2,5,6-tetrahydropyridine-3-carboxylic acid; 1,2,5,6-tetrahydropyridine-4-carboxylic acid; 3-amino-3-(2-chlorophenyl)-propionic acid; 3-amino-3-(2-thienyl)-propionic acid; 3-amino-3-(3-bromophenyl)-propionic acid; 3-amino-3-(4-chlorophenyl)-propionic acid; 3-amino-3-(4-methoxyphenyl)-propionic acid; 3-amino-4,4,4-trifluoro-butyric acid; 3-aminoadipic acid; D-β-phenylalanine; β-leucine; L-β-homoalanine; L-β-homoaspartic acid γ-benzyl ester; L-β-homoglutamic acid δ-benzyl ester; L-β-homoisoleucine; L-β-homoleucine; L-β-homomethionine; L-β-homophenylalanine; L-β-homoproline; L-β-homotryptophan; L-β-homovaline; L-Nω-benzyloxycarbonyl-β-homolysine; Nω-L-β-homoarginine; O-benzyl-L-β-homohydroxyproline; O-benzyl-L-β-homoserine; O-benzyl-L-β-homothreonine; O-benzyl-L-β-homotyrosine; γ-trityl-L-β-homoasparagine; (R)-β-phenylalanine; L-β-homoaspartic acid γ-t-butyl ester; L-β-homoglutamic acid δ-t-butyl ester; L-No)-β-homolysine; Nδ-trityl-L-β-homoglutamine; No)-2,2,4,6,7-pentamethyl-dihydrobenzofuran-5-sulfonyl-L-β-homoarginine; O-t-butyl-L-β-homohydroxy-proline; O-t-butyl-L-β-homoserine; O-t-butyl-L-β-homothreonine; O-t-butyl-L-β-homotyrosine; 2-aminocyclopentane carboxylic acid; and 2-aminocyclohexane carboxylic acid.

[0068] Amino acid analogues include analogues of alanine, valine, glycine or leucine. Examples of amino acid analogues of alanine, valine, glycine, and leucine include, but are not limited to, the following: α-methoxyglycine; α-allyl-L-alanine; α-aminoisobutyric acid; α-methyl-leucine; β-(1-naphthyl)-D-alanine; β-(1-naphthyl)-L-alanine; β-(2-naphthyl)-D-alanine; β-(2-naphthyl)-L-alanine; β-(2-pyridyl)-D-alanine; β-(2-pyridyl)-L-alanine; β-(2-thienyl)-D-alanine; β-(2-thienyl)-L-alanine; β-β-benzothienyl)-D-alanine; β-β-benzothienyl)-L-alanine; β-(3-pyridyl)-D-alanine; β-(3-pyridyl)-L-alanine; β-(4-pyridyl)-D-alanine; β-(4-pyridyl)-L-alanine; β-chloro-L-alanine; β-cyano-L-alanin; β-cyclohexyl-D-alanine; β-cyclohexyl-L-alanine; β-cyclopenten-1-yl-alanine; β-cyclopentyl-alanine; β-cyclopropyl-L-Ala-OH.dicyclohexylammonium salt; β-t-butyl-D-alanine; β-t-butyl-L-alanine; γ-aminobutyric acid; L-α,β-diaminopropionic acid; 2,4-dinitro-phenylglycine; 2,5-dihydro-D-phenylglycine; 2-amino-4,4,4-trifluorobutyric acid; 2-fluoro-phenylglycine; 3-amino-4,4,4-trifluoro-butyric acid; 3-fluoro-valine; 4,4,4-trifluoro-valine; 4,5-dehydro-L-leu-OH.dicyclohexylammonium salt; 4-fluoro-D-phenylglycine; 4-fluoro-L-phenylglycine; 4-hydroxy-D-phenylglycine; 5,5,5-trifluoro-leucine; 6-aminohexanoic acid; cyclopentyl-D-Gly-OH.dicyclohexylammonium salt; cyclopentyl-Gly-OH.dicyclohexylammonium salt; D-α,β-diaminopropionic acid; D-α-aminobutyric acid; D-α-t-butylglycine; D-(2-thienyl)glycine; D-(3-thienyl)glycine; D-2-aminocaproic acid; D-2-indanylglycine; D-allylglycine-dicyclohexylammonium salt; D-cyclohexylglycine; D-norvaline; D-phenylglycine; β-aminobutyric acid; β-aminoisobutyric acid; (2-bromophenyl)glycine; (2-methoxyphenyl)glycine; (2-methylphenyl)glycine; (2-thiazoyl)glycine; (2-thienyl)glycine; 2-amino-3-(dimethylamino)-propionic acid; L-α,β-diaminopropionic acid; L-α-aminobutyric acid; L-α-t-butylglycine; L-(3-thienyl)glycine; L-2-amino-3-(dimethylamino)-propionic acid; L-2-aminocaproic acid dicyclohexyl-ammonium salt; L-2-indanylglycine; L-allylglycine-dicyclohexyl ammonium salt; L-cyclohexylglycine; L-phenylglycine; L-propargylglycine; L-norvaline; N-α-aminomethyl-L-alanine; D-α,γ-diaminobutyric acid; L-α,γ-diaminobutyric acid; β-cyclopropyl-L-alanine; (N-β-(2,4-dinitrophenyl))-L-α,β-diaminopropionic acid; (N-β-1-(4,4-dimethyl-2,6-dioxocyclohex-1-ylidene)ethyl)-D-α,β-diaminopropionic acid; (N-β-1-(4,4-dimethyl-2,6-dioxocyclohex-1-ylidene)ethyl)-L-α,β-diaminopropionic acid; (N-β-4-methyltrityl)-L-α,β-diaminopropionic acid; (N-β-allyloxycarbonyl)-L-α,β-diaminopropionic acid; (N-γ-1-(4,4-dimethyl-2,6-dioxocyclohex-1-ylidene)ethyl)-D-α,γ-diaminobutyric acid; (N-γ-1-(4,4-dimethyl-2,6-dioxocyclohex-1-ylidene)ethyl)-L-α,γ-diaminobutyric acid; (N-γ-4-methyltrityl)-D-α,γ-diaminobutyric acid; (N-γ-4-methyltrityl)-L-α,γ-diaminobutyric acid; (N-γ-allyloxycarbonyl)-L-α,γ-diaminobutyric acid; D-α,γ-diaminobutyric acid; 4,5-dehydro-L-leucine; cyclopentyl-D-Gly-OH; cyclopentyl-Gly-OH; D-allylglycine; D-homocyclohexylalanine; L-1-pyrenylalanine; L-2-aminocaproic acid; L-allylglycine; L-homocyclohexylalanine; and N-(2-hydroxy-4-methoxy-Bzl)-Gly-OH.

[0069] Amino acid analogues include analogues of arginine or lysine. Examples of amino acid analogues of arginine and lysine include, but are not limited to, the following: citrulline; L-2-amino-3-guanidinopropionic acid; L-2-amino-3-ureidopropionic acid; L-citrulline; Lys(Me)₂-OH; Lys(N₃)—OH; Nδ-benzyloxycarbonyl-L-ornithine; Nω-nitro-D-arginine; Nω-nitro-L-arginine; α-methyl-ornithine; 2,6-diaminoheptanedioic acid; L-ornithine; (Nδ-1-(4,4-dimethyl-2,6-dioxo-cyclohex-1-ylidene)ethyl)-D-ornithine; (Nδ-1-(4,4-dimethyl-2,6-dioxo-cyclohex-1-ylidene)ethyl)-L-ornithine; (Nδ-4-methyltrityl)-D-ornithine; (Nδ-4-methyltrityl)-L-ornithine; D-ornithine; L-ornithine; Arg(Me)(Pbf)-OH; Arg(Me)₂-OH (asymmetrical); Arg(Me)2-OH (symmetrical); Lys(ivDde)-OH; Lys(Me)2-OH.HCl; Lys(Me3)-OH chloride; Nω-nitro-D-arginine; and Nω-nitro-L-arginine.

[0070] Amino acid analogues include analogues of aspartic or glutamic acids. Examples of amino acid analogues of aspartic and glutamic acids include, but are not limited to, the following: α-methyl-D-aspartic acid; α-methyl-glutamic acid; α-methyl-L-aspartic acid; γ-methylene-glutamic acid; (N-γ-ethyl)-L-glutamine; [N-α-(4-aminobenzoyl)]-L-glutamic acid; 2,6-diaminopimelic acid; L-α-aminosuberic acid; D-2-aminoadipic acid; D-α-aminosuberic acid; α-aminopimelic acid; iminodiacetic acid; L-2-amino adipic acid; threo-β-methyl-aspartic acid; γ-carboxy-D-glutamic acid γ,γ-di-t-butyl ester; γ-carboxy-L-glutamic acid γ,γ-di-t-butyl ester; Glu(OAll)-OH; L-Asu(OtBu)-OH; and pyroglutamic acid.

[0071] Amino acid analogues include analogues of cysteine and methionine. Examples of amino acid analogues of cysteine and methionine include, but are not limited to, Cys(farnesyl)-OH, Cys(farnesyl)-OMe, α-methyl-methionine, Cys(2-hydroxyethyl)-OH, Cys(3-aminopropyl)-OH, 2-amino-4-(ethylthio)butyric acid, buthionine, buthioninesulfoximine, ethionine, methionine methylsulfonium chloride, selenomethionine, cysteic acid, [2-(4-pyridyl)ethyl]-DL-penicillamine, [2-(4-pyridyl)ethyl]-L-cysteine, 4-methoxybenzyl-D-penicillamine, 4-methoxybenzyl-L-penicillamine, 4-methylbenzyl-D-penicillamine, 4-methylbenzyl-L-penicillamine, benzyl-D-cysteine, benzyl-L-cysteine, benzyl-DL-homocysteine, carbamoyl-L-cysteine, carboxyethyl-L-cysteine, carboxymethyl-L-cysteine, diphenylmethyl-L-cysteine, ethyl-L-cysteine, methyl-L-cysteine, t-butyl-D-cysteine, trityl-L-homocysteine, trityl-D-penicillamine, cystathionine, homocystine, L-homocystine, (2-aminoethyl)-L-cysteine, seleno-L-cystine, cystathionine, Cys(StBu)-OH, and acetamidomethyl-D-penicillamine.

[0072] Amino acid analogues include analogues of phenylalanine and tyrosine. Examples of amino acid analogues of phenylalanine and tyrosine include β-methyl-phenylalanine, β-hydroxyphenylalanine, α-methyl-3-methoxy-DL-phenylalanine, α-methyl-D-phenylalanine, α-methyl-L-phenylalanine, 1,2,3,4-tetrahydroisoquinoline-3-carboxylic acid, 2,4-dichloro-phenylalanine, 2-(trifluoromethyl)-D-phenylalanine, 2-(trifluoromethyl)-L-phenylalanine, 2-bromo-D-phenylalanine, 2-bromo-L-phenylalanine, 2-chloro-D-phenylalanine, 2-chloro-L-phenylalanine, 2-cyano-D-phenylalanine, 2-cyano-L-phenylalanine, 2-fluoro-D-phenylalanine, 2-fluoro-L-phenylalanine, 2-methyl-D-phenylalanine, 2-methyl-L-phenylalanine, 2-nitro-D-phenylalanine, 2-nitro-L-phenylalanine, 2;4;5-trihydroxy-phenylalanine, 3,4,5-trifluoro-D-phenylalanine, 3,4,5-trifluoro-L-phenylalanine, 3,4-dichloro-D-phenylalanine, 3,4-dichloro-L-phenylalanine, 3,4-difluoro-D-phenylalanine, 3,4-difluoro-L-phenylalanine, 3,4-dihydroxy-L-phenylalanine, 3,4-dimethoxy-L-phenylalanine, 3,5,3′-triiodo-L-thyronine, 3,5-diiodo-D-tyrosine, 3,5-diiodo-L-tyrosine, 3,5-diiodo-L-thyronine, 3-(trifluoromethyl)-D-phenylalanine, 3-(trifluoromethyl)-L-phenylalanine, 3-amino-L-tyrosine, 3-bromo-D-phenylalanine, 3-bromo-L-phenylalanine, 3-chloro-D-phenylalanine, 3-chloro-L-phenylalanine, 3-chloro-L-tyrosine, 3-cyano-D-phenylalanine, 3-cyano-L-phenylalanine, 3-fluoro-D-phenylalanine, 3-fluoro-L-phenylalanine, 3-fluoro-tyrosine, 3-iodo-D-phenylalanine, 3-iodo-L-phenylalanine, 3-iodo-L-tyrosine, 3-methoxy-L-tyrosine, 3-methyl-D-phenylalanine, 3-methyl-L-phenylalanine, 3-nitro-D-phenylalanine, 3-nitro-L-phenylalanine, 3-nitro-L-tyrosine, 4-(trifluoromethyl)-D-phenylalanine, 4-(trifluoromethyl)-L-phenylalanine, 4-amino-D-phenylalanine, 4-amino-L-phenylalanine, 4-benzoyl-D-phenylalanine, 4-benzoyl-L-phenylalanine, 4-bis(2-chloroethyl)amino-L-phenylalanine, 4-bromo-D-phenylalanine, 4-bromo-L-phenylalanine, 4-chloro-D-phenylalanine, 4-chloro-L-phenylalanine, 4-cyano-D-phenylalanine, 4-cyano-L-phenylalanine, 4-fluoro-D-phenylalanine, 4-fluoro-L-phenylalanine, 4-iodo-D-phenylalanine, 4-iodo-L-phenylalanine, homophenylalanine, thyroxine, 3,3-diphenylalanine, thyronine, ethyl-tyrosine, and methyl-tyrosine.

[0073] Amino acid analogues include analogues of proline. Examples of amino acid analogues of proline include, but are not limited to, 3,4-dehydro-proline, 4-fluoro-proline, cis-4-hydroxy-proline, thiazolidine-2-carboxylic acid, and trans-4-fluoro-proline.

[0074] Amino acid analogues include analogues of serine and threonine. Examples of amino acid analogues of serine and threonine include, but are not limited to, 3-amino-2-hydroxy-5-methylhexanoic acid, 2-amino-3-hydroxy-4-methylpentanoic acid, 2-amino-3-ethoxybutanoic acid, 2-amino-3-methoxybutanoic acid, 4-amino-3-hydroxy-6-methylheptanoic acid, 2-amino-3-benzyloxypropionic acid, 2-amino-3-benzyloxypropionic acid, 2-amino-3-ethoxypropionic acid, 4-amino-3-hydroxybutanoic acid, and α-methylserine.

[0075] Amino acid analogues include analogues of tryptophan. Examples of amino acid analogues of tryptophan include, but are not limited to, the following: α-methyl-tryptophan; β-(3-benzothienyl)-D-alanine; β-(3-benzothienyl)-L-alanine; 1-methyl-tryptophan; 4-methyl-tryptophan; 5-benzyloxy-tryptophan; 5-bromo-tryptophan; 5-chloro-tryptophan; 5-fluoro-tryptophan; 5-hydroxy-tryptophan; 5-hydroxy-L-tryptophan; 5-methoxy-tryptophan; 5-methoxy-L-tryptophan; 5-methyl-tryptophan; 6-bromo-tryptophan; 6-chloro-D-tryptophan; 6-chloro-tryptophan; 6-fluoro-tryptophan; 6-methyl-tryptophan; 7-benzyloxy-tryptophan; 7-bromo-tryptophan; 7-methyl-tryptophan; D-1,2,3,4-tetrahydro-norharman-3-carboxylic acid; 6-methoxy-1,2,3,4-tetrahydronorharman-1-carboxylic acid; 7-azatryptophan; L-1,2,3,4-tetrahydro-norharman-3-carboxylic acid; 5-methoxy-2-methyl-tryptophan; and 6-chloro-L-tryptophan.

[0076] In some embodiments, amino acid analogues are racemic. In some embodiments, the D isomer of the amino acid analogue is used. In some embodiments, the L isomer of the amino acid analogue is used. In other embodiments, the amino acid analogue comprises chiral centers that are in the R or S configuration. In still other embodiments, the amino group(s) of a β-amino acid analogue is substituted with a protecting group, e.g., tert-butyloxycarbonyl (BOC group), 9-fluorenylmethyloxycarbonyl (FMOC), tosyl, and the like. In yet other embodiments, the carboxylic acid functional group of a β-amino acid analogue is protected, e.g., as its ester derivative. In some embodiments the salt of the amino acid analogue is used.

[0077] A “non-essential” amino acid residue is a residue that can be altered from the wild-type sequence of a polypeptide without abolishing or substantially abolishing its essential biological or biochemical activity (e.g., receptor binding or activation). An “essential” amino acid residue is a residue that, when altered from the wild-type sequence of the polypeptide, results in abolishing or substantially abolishing the polypeptide's essential biological or biochemical activity.

[0078] A “conservative amino acid substitution” is one in which the amino acid residue is replaced with an amino acid residue having a similar side chain. Families of amino acid residues having similar side chains have been defined in the art. These families include amino acids with basic side chains (e.g., K, R, H), acidic side chains (e.g., D, E), uncharged polar side chains (e.g., G, N, Q, S, T, Y, C), nonpolar side chains (e.g., A, V, L, I, P, F, M, W), beta-branched side chains (e.g., T, V, I) and aromatic side chains (e.g., Y, F, W, H). Thus, a predicted nonessential amino acid residue in a polypeptide, for example, is replaced with another amino acid residue from the same side chain family. Other examples of acceptable substitutions are substitutions based on isosteric considerations (e.g. norleucine for methionine) or other properties (e.g. 2-thienylalanine for phenylalanine).

[0079] The term “capping group” refers to the chemical moiety occurring at either the carboxy or amino terminus of the polypeptide chain of the subject peptidomimetic macrocycle. The capping group of a carboxy terminus includes an unmodified carboxylic acid (i.e. —COOH) or a carboxylic acid with a substituent. For example, the carboxy terminus can be substituted with an amino group to yield a carboxamide at the C-terminus. Various substituents include but are not limited to primary and secondary amines, including pegylated secondary amines. Non-limiting representative secondary amine capping groups for the C-terminus include:

[chemical structure]

[chemical structure]

[0080] The capping group of an amino terminus includes an unmodified amine (i.e. —NH₂) or an amine with a substituent. For example, the amino terminus can be substituted with an acyl group to yield a carboxamide at the N-terminus. Various substituents include but are not limited to substituted acyl groups, including C₁-C₆ carbonyls, C₇-C₃₀ carbonyls, and pegylated carbamates. Non-limiting representative capping groups for the N-terminus include:

[chemical structure]

[chemical structure]

[0081] The term “member” as used herein in conjunction with macrocycles or macrocycle-forming linkers refers to the atoms that form or can form the macrocycle, and excludes substituent or side chain atoms. By analogy, cyclodecane, 1,2-difluoro-decane and 1,3-dimethyl cyclodecane are all considered ten-membered macrocycles as the hydrogen or fluoro substituents or methyl side chains do not participate in forming the macrocycle.

[0082] The symbol “ [symbol] ” when used as part of a molecular structure refers to a single bond or a trans or cis double bond.

[0083] The term “amino acid side chain” refers to a moiety attached to the α-carbon (or another backbone atom) in an amino acid. For example, the amino acid side chain for alanine is methyl, the amino acid side chain for phenylalanine is phenylmethyl, the amino acid side chain for cysteine is thiomethyl, the amino acid side chain for aspartate is carboxymethyl, the amino acid side chain for tyrosine is 4-hydroxyphenylmethyl, etc. Other non-naturally occurring amino acid side chains are also included, for example, those that occur in nature (e.g., an amino acid metabolite) or those that are made synthetically (e.g., an α,α di-substituted amino acid).

[0084] The term “α,α di-substituted amino” acid refers to a molecule or moiety containing both an amino group and a carboxyl group bound to a carbon (the α-carbon) that is attached to two natural or non-natural amino acid side chains.

[0085] The term “polypeptide” encompasses two or more naturally or non-naturally-occurring amino acids joined by a covalent bond (e.g., an amide bond). Polypeptides as described herein include full length proteins (e.g., fully processed proteins) as well as shorter amino acid sequences (e.g., fragments of naturally-occurring proteins or synthetic polypeptide fragments).

[0086] The term “macrocyclization reagent” or “macrocycle-forming reagent” as used herein refers to any reagent which may be used to prepare a peptidomimetic macrocycle of the invention by mediating the reaction between two reactive groups. Reactive groups may be, for example, an azide and alkyne, in which case macrocyclization reagents include, without limitation, Cu reagents such as reagents which provide a reactive Cu(I) species, such as CuBr, CuI or CuOTf, as well as Cu(II) salts such as Cu(CO₂CH₃)₂, CuSO₄, and CuCl₂ that can be converted in situ to an active Cu(I) reagent by the addition of a reducing agent such as ascorbic acid or sodium ascorbate. Macrocyclization reagents may additionally include, for example, Ru reagents known in the art such as Cp*RuCl(PPh₃)₂, [Cp*RuCl]₄ or other Ru reagents which may provide a reactive Ru(II) species. In other cases, the reactive groups are terminal olefins. In such embodiments, the macrocyclization reagents or macrocycle-forming reagents are metathesis catalysts including, but not limited to, stabilized, late transition metal carbene complex catalysts such as Group VIII transition metal carbene catalysts. For example, such catalysts are Ru and Os metal centers having a +2 oxidation state, an electron count of 16 and pentacoordinated. In other examples, catalysts have W or Mo centers. Various catalysts are disclosed in Grubbs et al., “Ring Closing Metathesis and Related Processes in Organic Synthesis” Acc. Chem. Res. 1995, 28, 446-452, and U.S. Pat. No. 5,811,515; U.S. Pat. No. 7,932,397; U.S. Application No. 2011/0065915; U.S. Application No. 2011/0245477; Yu et al., “Synthesis of Macrocyclic Natural Products by Catalyst-Controlled Stereoselective Ring-Closing Metathesis,” Nature 2011, 479, 88; and Peryshkov et al., “Z-Selective Olefin Metathesis Reactions Promoted by Tungsten Oxo Alkylidene Complexes,” J. Am. Chem. Soc. 2011, 133, 20754. In yet other cases, the reactive groups are thiol groups. In such embodiments, the macrocyclization reagent is, for example, a linker functionalized with two thiol-reactive groups such as halogen groups.

[0087] The term “halo” or “halogen” refers to fluorine, chlorine, bromine or iodine or a radical thereof.

[0088] The term “alkyl” refers to a hydrocarbon chain that is a straight chain or branched chain, containing the indicated number of carbon atoms. For example, C₁-C₁₀ indicates that the group has from 1 to 10 (inclusive) carbon atoms in it. In the absence of any numerical designation, “alkyl” is a chain (straight or branched) having 1 to 20 (inclusive) carbon atoms in it.

[0089] The term “alkylene” refers to a divalent alkyl (i.e., —R—).

[0090] The term “alkenyl” refers to a hydrocarbon chain that is a straight chain or branched chain having one or more carbon-carbon double bonds. The alkenyl moiety contains the indicated number of carbon atoms. For example, C₂-C₁₀ indicates that the group has from 2 to 10 (inclusive) carbon atoms in it. The term “lower alkenyl” refers to a C₂-C₆ alkenyl chain. In the absence of any numerical designation, “alkenyl” is a chain (straight or branched) having 2 to 20 (inclusive) carbon atoms in it.

[0091] The term “alkynyl” refers to a hydrocarbon chain that is a straight chain or branched chain having one or more carbon-carbon triple bonds. The alkynyl moiety contains the indicated number of carbon atoms. For example, C₂-C₁₀ indicates that the group has from 2 to 10 (inclusive) carbon atoms in it. The term “lower alkynyl” refers to a C₂-C₆ alkynyl chain. In the absence of any numerical designation, “alkynyl” is a chain (straight or branched) having 2 to 20 (inclusive) carbon atoms in it.

[0092] The term “aryl” refers to a monocyclic or bicyclic aromatic ring system wherein 0, 1, 2, 3, or 4 atoms of each ring are substituted by a substituent. Examples of aryl groups include phenyl, biphenyl, naphthyl and the like. The term “arylalkoxy” refers to an alkoxy substituted with aryl.

[0093] “Arylalkyl” refers to an aryl group, as defined above, wherein one of the aryl group's hydrogen atoms has been replaced with a C₁-C₅ alkyl group, as defined above. Representative examples of an arylalkyl group include, but are not limited to, 2-methylphenyl, 3-methylphenyl, 4-methylphenyl, 2-ethylphenyl, 3-ethylphenyl, 4-ethylphenyl, 2-propylphenyl, 3-propylphenyl, 4-propylphenyl, 2-butylphenyl, 3-butylphenyl, 4-butylphenyl, 2-pentylphenyl, 3-pentylphenyl, 4-pentylphenyl, 2-isopropylphenyl, 3-isopropylphenyl, 4-isopropylphenyl, 2-isobutylphenyl, 3-isobutylphenyl, 4-isobutylphenyl, 2-sec-butylphenyl, 3-sec-butylphenyl, 4-sec-butylphenyl, 2-t-butylphenyl, 3-t-butylphenyl and 4-t-butylphenyl.

[0094] “Arylamido” refers to an aryl group, as defined above, wherein one of the aryl group's hydrogen atoms has been replaced with one or more —C(O)NH₂ groups. Representative examples of an arylamido group include 2-C(O)NH2-phenyl, 3-C(O)NH₂-phenyl, 4-C(O)NH₂-phenyl, 2-C(O)NH₂-pyridyl, 3-C(O)NH₂-pyridyl, and 4-C(O)NH₂-pyridyl,

[0095] “Alkylheterocycle” refers to a C₁-C₅ alkyl group, as defined above, wherein one of the C₁-C₅ alkyl group's hydrogen atoms has been replaced with a heterocycle. Representative examples of an alkylheterocycle group include, but are not limited to, —CH₂CH₂-morpholine, —CH₂CH₂-piperidine, —CH₂CH₂CH₂-morpholine, and —CH₂CH₂CH₂-imidazole.

[0096] “Alkylamido” refers to a C₁-C₅ alkyl group, as defined above, wherein one of the C₁-C₅ alkyl group's hydrogen atoms has been replaced with a —C(O)NH₂ group. Representative examples of an alkylamido group include, but are not limited to, —CH₂—C(O)NH₂, —CH₂CH₂—C(O)NH₂, —CH₂CH₂CH₂C(O)NH₂, —CH₂CH₂CH₂CH₂C(O)NH₂, —CH₂CH₂CH₂CH₂CH₂C(O)NH₂, —CH₂CH(C(O)NH₂)CH₃, —CH₂CH(C(O)NH₂)CH₂CH₃, —CH(C(O)NH₂)CH₂CH₃, —C(CH₃)₂CH₂C(O)NH₂, —CH₂—CH₂—NH—C(O)—CH₃, —CH₂—CH₂—NH—C(O)—CH₃—CH3, and —CH₂—CH₂—NH—C(O)—CH═CH₂.

[0097] “Alkanol” refers to a C₁-C₅ alkyl group, as defined above, wherein one of the C₁-C₅ alkyl group's hydrogen atoms has been replaced with a hydroxyl group. Representative examples of an alkanol group include, but are not limited to, —CH₂OH, —CH₂CH₂OH, —CH₂CH₂CH₂OH, —CH₂CH₂CH₂CH₂OH, —CH₂CH₂CH₂CH₂CH₂OH, —CH₂CH(OH)CH₃, —CH₂CH(OH)CH₂CH₃, —CH(OH)CH₃ and —C(CH₃)₂CH₂OH.

[0098] “Alkylcarboxy” refers to a C₁-C₅ alkyl group, as defined above, wherein one of the C₁-C₅ alkyl group's hydrogen atoms has been replaced with a —COOH group. Representative examples of an alkylcarboxy group include, but are not limited to, —CH₂COOH, —CH₂CH₂COOH, —CH₂CH₂CH₂COOH, —CH₂CH₂CH₂CH₂COOH, —CH₂CH(COOH)CH₃, —CH₂CH₂CH₂CH₂CH₂COOH, —CH₂CH(COOH)CH₂CH₃, —CH(COOH)CH₂CH₃ and —C(CH₃)₂CH₂COOH.

[0099] The term “cycloalkyl” as employed herein includes saturated and partially unsaturated cyclic hydrocarbon groups having 3 to 12 carbons, preferably 3 to 8 carbons, and more preferably 3 to 6 carbons, wherein the cycloalkyl group additionally is optionally substituted. Some cycloalkyl groups include, without limitation, cyclopropyl, cyclobutyl, cyclopentyl, cyclopentenyl, cyclohexyl, cyclohexenyl, cycloheptyl, and cyclooctyl.

[0100] The term “heteroaryl” refers to an aromatic 5-8 membered monocyclic, 8-12 membered bicyclic, or 11-14 membered tricyclic ring system having 1-3 heteroatoms if monocyclic, 1-6 heteroatoms if bicyclic, or 1-9 heteroatoms if tricyclic, said heteroatoms selected from O, N, or S (e.g., carbon atoms and 1-3, 1-6, or 1-9 heteroatoms of O, N, or S if monocyclic, bicyclic, or tricyclic, respectively), wherein 0, 1, 2, 3, or 4 atoms of each ring are substituted by a substituent. Examples of heteroaryl groups include pyridyl, furyl or furanyl, imidazolyl, benzimidazolyl, pyrimidinyl, thiophenyl or thienyl, quinolinyl, indolyl, thiazolyl, and the like.

[0101] The term “heteroarylalkyl” or the term “heteroaralkyl” refers to an alkyl substituted with a heteroaryl. The term “heteroarylalkoxy” refers to an alkoxy substituted with heteroaryl.

[0102] The term “heteroarylalkyl” or the term “heteroaralkyl” refers to an alkyl substituted with a heteroaryl. The term “heteroarylalkoxy” refers to an alkoxy substituted with heteroaryl.

[0103] The term “heterocyclyl” refers to a nonaromatic 5-8 membered monocyclic, 8-12 membered bicyclic, or 11-14 membered tricyclic ring system having 1-3 heteroatoms if monocyclic, 1-6 heteroatoms if bicyclic, or 1-9 heteroatoms if tricyclic, said heteroatoms selected from O, N, or S (e.g., carbon atoms and 1-3, 1-6, or 1-9 heteroatoms of O, N, or S if monocyclic, bicyclic, or tricyclic, respectively), wherein 0, 1, 2 or 3 atoms of each ring are substituted by a substituent. Examples of heterocyclyl groups include piperazinyl, pyrrolidinyl, dioxanyl, morpholinyl, tetrahydrofuranyl, and the like.

[0104] The term “substituent” refers to a group replacing a second atom or group such as a hydrogen atom on any molecule, compound or moiety. Suitable substituents include, without limitation, halo, hydroxy, mercapto, oxo, nitro, haloalkyl, alkyl, alkaryl, aryl, aralkyl, alkoxy, thioalkoxy, aryloxy, amino, alkoxycarbonyl, amido, carboxy, alkanesulfonyl, alkylcarbonyl, and cyano groups.

[0105] In some embodiments, the compounds of this invention contain one or more asymmetric centers and thus occur as racemates and racemic mixtures, single enantiomers, individual diastereomers and diastereomeric mixtures. All such isomeric forms of these compounds are included in the present invention unless expressly provided otherwise. In some embodiments, the compounds of this invention are also represented in multiple tautomeric forms, in such instances, the invention includes all tautomeric forms of the compounds described herein (e.g., if alkylation of a ring system results in alkylation at multiple sites, the invention includes all such reaction products). All such isomeric forms of such compounds are included in the present invention unless expressly provided otherwise. All crystal forms of the compounds described herein are included in the present invention unless expressly provided otherwise.

[0106] As used herein, the terms “increase” and “decrease” mean, respectively, to cause a statistically significantly (i.e., p<0.1) increase or decrease of at least 5%.

[0107] As used herein, the recitation of a numerical range for a variable is intended to convey that the variable is equal to any of the values within that range. Thus, for a variable which is inherently discrete, the variable is equal to any integer value within the numerical range, including the end-points of the range. Similarly, for a variable which is inherently continuous, the variable is equal to any real value within the numerical range, including the end-points of the range. As an example, and without limitation, a variable which is described as having values between 0 and 2 takes the values 0, 1 or 2 if the variable is inherently discrete, and takes the values 0.0, 0.1, 0.01, 0.001, or any other real values ≥0 and ≤2 if the variable is inherently continuous.

[0108] As used herein, unless specifically indicated otherwise, the word “or” is used in the inclusive sense of “or” and not the exclusive sense of “either/or.”

[0109] The term “on average” represents the mean value derived from performing at least three independent replicates for each data point.

[0110] The term “biological activity” encompasses structural and functional properties of a macrocycle of the invention. Biological activity is, for example, structural stability, alpha-helicity, affinity for a target, resistance to proteolytic degradation, cell penetrability, intracellular stability, in vivo stability, or any combination thereof.

[0111] The details of one or more particular embodiments of the invention are set forth in the accompanying drawings and the description below. Other features, objects, and advantages of the invention will be apparent from the description and drawings, and from the claims.

### Peptidomimetic Macrocycles of the Invention

[0112] The present invention provides pharmaceutical formulations comprising an effective amount of peptidomimetic macrocycles or pharmaceutically acceptable salts thereof. The peptidomimetic macrocycles of the invention are cross-linked (e.g., stapled or stitched) and possess improved pharmaceutical properties relative to their corresponding uncross-linked peptidomimetic macrocycles. These improved properties include improved bioavailability, enhanced chemical and in vivo stability, increased potency, and reduced immunogenicity (i.e., fewer or less severe injection site reactions).

[0113] In some embodiments, the peptidomimetic macrocycles of the invention are crosslinked and comprise a warhead, and are used for ligand-directed covalent modification of cysteine- and lysine-containing proteins.

[0114] In some embodiments, the peptide sequences are derived from BIM.

[0115] In some embodiments, a peptidomimetic macrocycle peptide derived from a human BIM peptide can be a peptide comprising 1, 2, 3, 4, 5, 6, 7, 8, 9, 10, 11, 12, 13, 14, 15, 16, 17, 18, 19, 20, 21, or 22 amino acids from a BIM peptide sequence.

[0116] In some embodiments, a peptidomimetic macrocycle peptide derived from a human BIM peptide sequence can be a peptide comprising 1, 2, 3, 4, 5, 6, 7, 8, 9, 10, 11, 12, 13, 14, 15, 16, 17, 18, 19, 20, 21, or 22 amino acids that are different from the selected sequences from which the peptide is derived. In some embodiments, a peptidomimetic macrocycle peptide derived from a human BIM peptide sequence can be a peptide comprising a mutation at amino acid position 1, 2, 3, 4, 5, 6, 7, 8, 9, 10, 11, 12, 13, 14, 15, 16, 17, 18, 19, 20, 21, or 22. In some embodiments, mutations are mutations of non-essential amino acids. In some embodiments, mutations are mutations of essential amino acids. In some embodiments, mutations are mutations of hydrophobic amino acids. In some embodiments, mutations are mutations of naturally occurring amino acids. In some embodiments, mutations are mutations to a conservative amino acid. In some embodiments, a peptidomimetic macrocycle peptide derived from a human BIM peptide sequence can be a peptide comprising 1, 2, 3, 4, 5, 6, 7, 8, 9, 10, 11, 12, 13, 14, 15, 16, 17, 18, 19, 20, 21, or 22 amino acid analogues. In some embodiments, a peptidomimetic macrocycle peptide derived from a human BIM peptide sequence can be a peptide comprising 1 or 2 capping groups.

[0117] In some embodiments, the peptidomimetic macrocycle comprises a C-terminal truncation of 1, 2, 3, 4, 5, 6, 7, 8, 9, 10, 11, 12, 13, 14, 15, 16, 17, 18, 19, 20, 21, 22, 23, 24, 25, 26, 27, 28, 29 or 30 amino acids from an amino acid sequence in Table 1. In some embodiments, the peptidomimetic macrocycle comprises a N-terminal truncation of 1, 2, 3, 4, 5, 6, 7, 8, 9, 10, 11, 12, 13, 14, 15, 16, 17, 18, 19, 20, 21, or 22 amino acids from the sequence of BIM.

[0118] A non-limiting list of suitable BIM macrocycles for use in the present disclosure are given in Table 1. In Table 1, at the C-terminus, some peptides possess a carboxamide terminus (shown as —NH₂); some peptides possess a hydroxyl terminus (shown as —OH); some peptides possess a 5-carboxyfluorescein terminus (shown as −5-FAM); some peptides possess a isobutylamide terminus (shown as —NHiBu); some peptides possess a cyclohexylamide terminus (shown as —NHChx); some peptides possess a cyclohexylmethylamide terminus (shown as —NHMeChx); some peptides possess a phenethylamide terminus (shown as —NHPe); some peptides possess a n-butylamide terminus (shown as —NHBu); some peptides possess a sec-butylamide terminus (shown as —NHsBu); and some peptides possess an uncapped terminus (shown as no terminal modification).

[0119] In Table 1, at the N-terminus, some peptides possess an acetyl terminus (shown as Ac—); some peptides possess a fluorescein isothiocyanate terminus (shown as FITC-); some peptides possess a single-unit polyethylene glycol terminus (shown as dPEG1-); some peptides possess a five-unit polyethylene glycol terminus (shown as dPEG5-); some peptides possess an eleven-unit polyethylene glycol terminus (shown as dPEG11-); some peptides possess a propyl terminus (shown as Pr—); some peptides possess a biotin terminus (shown as Biotin-); some peptides possess a KLH terminus (shown as KLH-); some peptides possess an ovalbumin terminus (shown as OVA-); some peptides possess an uncapped terminus (shown as H—); some peptides possess a isobutyl terminus (shown as iBu-); some peptides possess a decanoyl terminus (shown as Decac-); some peptides possess a benzyl terminus (shown as Bz-); some peptides possess a cyclohexyl terminus (shown as Chx-); some peptides possess a benzyl terminus (shown as Bz-); some peptides possess a Vrl terminus (shown as Vrl-); some peptides possess a HBS terminus (shown as HBS—); some peptides possess a MeIm terminus (shown as MeImC-); some peptides possess a tert-butyl terminus (shown as t-Bu-U—); some peptides possess a nonanoyl terminus (shown as non-U—); some peptides possess a ethyl terminus (shown as Et-U—); some peptides possess a cyclohexyl terminus (shown as Chx-U—); some peptides possess a isopropyl terminus (shown as iPr-U—); some peptides possess a phenyl terminus (shown as Ph-U—); some peptides possess a uric terminus (shown as NH2CO—); some peptides possess a palmitoyl terminus (shown as Pam-); some peptides possess a heptenoic terminus (shown as Hep-); and some peptides possess a 5-carboxytetramethylrhodamine terminus (shown as 5-TAMRA-).

TABLE 1

| SEQ ID NO | Peptide sequence |
|---|---|
| 1 | Ac-IWIAQELRRIGDEFNAYYARR-NH2 |
| 2 | Ac-IWIAQELR$IGD$FNAYYARR-NH2 |
| 3 | Ac-IWIAQELR$IED$FNAYYARR-NH2 |
| 4 | FITC-IWIAQELRRIGDEFNAYYARR-NH2 |
| 5 | FITC-IWIAQELR$IGD$FNAYYARR-NH2 |
| 6 | FITC-IWIAQELR$IED$FNAYYARR-NH2 |
| 7 | Ac-IWIAQQLR$IGD$FNAYYARR-NH2 |
| 8 | Ac-RWIAQQLR$IGD$FNAYYARR-NH2 |
| 9 | Ac-IRIAQQLR$IGD$FNAYYARR-NH2 |
| 10 | Ac-RRIAQQLR$IGD$FNAYYARR-NH2 |
| 11 | Ac-EIWIAQQLR$IGD$FNAYYARR-NH2 |
| 12 | Ac-ERRIAQQLR$IGD$FNAYYARR-NH2 |
| 13 | Ac-IRIAQELR$IGD$FNAYYARR-NH2 |
| 14 | Ac-RWIAQELR$IGD$FNAYYARR-NH2 |
| 15 | Ac-RRIAQELR$IGD$FNAYYARR-NH2 |
| 16 | Ac-EIWIAQELR$IGD$FNAYYARR-NH2 |
| 17 | Ac-ERWIAQELR$IGD$FNAYYARR-NH2 |
| 18 | Ac-EIRIAQELR$IGD$FNAYYARR-NH2 |
| 19 | Ac-ERRIAQELR$IGD$FNAYYARR-NH2 |
| 20 | PEG1-IWIAQELR$IGD$FNAYYARR-NH2 |
| 21 | PEG5-IWIAQELR$IGD$FNAYYARR-NH2 |
| 22 | PEG11-IWIAQELR$IGD$FNAYYARR-NH2 |
| 23 | Ac-IWIAQELR$IGD$FNASYARR-NH2 |
| 24 | Ac-RRIAQELR$IGD$FNASYARR-NH2 |
| 25 | Ac-ERRIAQELR$IGD$FNASYARR-NH2 |
| 26 | Ac-RRIAQELR$IGD$FNAYYAR-NH2 |
| 27 | Ac-RRIAQELR$IGD$FNAYYA-NH2 |
| 28 | Ac-RRIAQELR$IGD$FNAYYAib-NH2 |
| 29 | Ac-RRIAQELR$IGD$FNASYAib-NH2 |
| 30 | Ac-IWIAQELR$IAibD$FNAYYAR-NH2 |
| 31 | Ac-IWIAQELR%IAibD%FNAYYAR-NH2 |
| 32 | Ac-IRIAQELRRIGDEFNETYTRR-NH2 |
| 33 | Ac-IRIAQELR$IGD$FNETYTRR-NH2 |
| 34 | Ac-IRIAQELR$IED$FNETYTRR-NH2 |
| 35 | Ac-IWIAQELR$/IGD$/FNAYYARR-NH2 |
| 36 | Pr-IWIAQELR$IGD$FNAYYARR-NH2 |
| 37 | Ac-IWIAQELR$IAibD$FNAYYARR-NH2 |
| 38 | Ac-IWIAQELR%IAibD%FNAYYARR-NH2 |
| 39 | Ac-IWIAQELR$IGD$ANAYYARR-NH2 |
| 40 | Ac-IWIAQELR$IGD$FAAYYARR-NH2 |
| 41 | Ac-IWIAQELR$IGD$AAAYYARR-NH2 |
| 42 | Ac-IWIAQELR%IGD%FNAYYARR-NH2 |
| 43 | Ac-AWIAQELR$IGD$FNAYYARR-NH2 |
| 44 | Ac-IWAAQELR$IGD$FNAYYARR-NH2 |
| 45 | Ac-AWAAQELR$IGD$FNAYYARR-NH2 |
| 46 | Ac-IWIAibQELR$IGD$FNAYYARR-NH2 |
| 47 | Ac-IWIAQELR$IGD$FNAAYARR-NH2 |
| 48 | Ac-IWIAQELR$IGD$FNAYAARR-NH2 |
| 49 | Ac-IWIAQELR$IGD$FNAAAARR-NH2 |
| 50 | Ac-IWIAQELR$IGD$FNAYYAibRR-NH2 |
| 51 | Ac-IAIAQELR%IAibD%FNAYYARR-NH2 |
| 52 | Ac-IAIAQELR$IAibD$FNAYYARR-NH2 |
| 53 | Ac-DIIRNIAibRHLA$VGD$NleDRSI-NH2 |
| 54 | Ac-DIIRNIARHLA$VGD$NleDKSI-NH2 |
| 55 | Ac-DIIKNIARHLA$VGD$NleDRSI-NH2 |
| 56 | Ac-DIIRNIARHLACVGDCNleDRSI-NH2 |
| 57 | Ac-DIIRNIARHLACVAibDCNleDRSI-NH2 |
| 58 | Ac-IWIAQELR$IGD$FNA-NH2 |
| 59 | Ac-IWIAQELR$IGD$FNRSI-NH2 |
| 60 | Ac-IWIAQELR$IGD$FNRSIARR-NH2 |
| 61 | Ac-IWIAQELR$IGD$NleDRSI-NH2 |
| 62 | Ac-IWIAQELR$VGD$NleDRSI-NH2 |
| 63 | Ac-IWIAQEAR$IGA$FNAYYARR-NH2 |
| 64 | Ac-WIAQELR$IGD$FNAYYARR-NH2 |
| 65 | Ac-IAQELR$IGD$FNAYYARR-NH2 |
| 66 | Ac-AQELR$IGD$FNAYYARR-NH2 |
| 67 | Ac-QELR$IGD$FNAYYARR-NH2 |
| 68 | Ac-ELR$IGD$FNAYYARR-NH2 |
| 69 | Ac-IWIAQELR$IGD$FNAYYAR-NH2 |
| 70 | Ac-IWIAQELR$IGD$FNAYYA-NH2 |
| 71 | Ac-IWIAQELR$IGD$FNAYY-NH2 |
| 72 | Ac-IWIAQELR$IGD$FNAY-NH2 |
| 73 | Ac-IAIAQELR$IGD$FNAYYARR-NH2 |
| 74 | Ac-IWIAAELR$IGD$FNAYYARR-NH2 |
| 75 | Ac-IWIAQALR$IGD$FNAYYARR-NH2 |
| 76 | Ac-IWIAQEAR$IGD$FNAYYARR-NH2 |
| 77 | Ac-IWIAQELA$IGD$FNAYYARR-NH2 |
| 78 | Ac-IWIAQELR$AGD$FNAYYARR-NH2 |
| 79 | Ac-IWIAQELR$IAD$FNAYYARR-NH2 |
| 80 | Ac-IWIAQELR$IGA$FNAYYARR-NH2 |
| 81 | Ac-IWIAQELR$IGD$FNAYYAAR-NH2 |
| 82 | Ac-IWIAQELR$IGD$FNAYYARA-NH2 |
| 83 | Pr-RNIARHLA$VGD$FNAYYARR-NH2 |
| 84 | Pr-RNIARHLAib$VGD$FNAYYARR-NH2 |
| 85 | Pr-RNIAibRHLAib$VGD$FNAYYARR-NH2 |
| 86 | Pr-RNChgARHLA$VAibD$FNAYYARR-NH2 |
| 87 | Pr-RNChaARHLA$VAibD$FNAYYARR-NH2 |
| 88 | FITC-BaIWIAQELRRIGDEFNAYYARR-NH2 |
| 89 | Biotin-AhxIWIAQELRRIGDEFNAYYARR-NH2 |
| 90 | KLH-CBaIWIAQELRRIGDEFNAYYARR-NH2 |
| 91 | OVA-CBaIWIAQELRRIGDEFNAYYARR-NH2 |
| 92 | FITC-BaIWIAQELR$IGD$FNAYYARR-NH2 |
| 93 | Biotin-AhxIWIAQELR$IGD$FNAYYARR-NH2 |
| 94 | KLH-CBaIWIAQELR$IGD$FNAYYARR-NH2 |
| 95 | OVA-CBaIWIAQELR$IGD$FNAYYARR-NH2 |
| 96 | FITC-BaIWIAQELR$IED$FNAYYARR-NH2 |
| 97 | Biotin-AhxIWIAQELR$IED$FNAYYARR-NH2 |
| 98 | FITC-BaIWIAQELR$/IGD$/FNAYYARR-NH2 |
| 99 | Ac-BaIWIAQELR$IGD$FNAYYAR-NH2 |
| 100 | Ac-IWIAQELR%IGD%FNAYYARR-NH2 |
| 101 | H-CBaIWIAQELR$IGD$FNAYYARR-NH2 |
| 102 | Ac-IWIAQALR$IGD$FAAYYARR-NH2 |
| 103 | Ac-IWIAQALR$IAibD$FNAYYARR-NH2 |
| 104 | Ac-IWIAQ$LRR$GDEFNAYYARR-NH2 |
| 105 | Ac-IWIAQ$LRR$GDAFNAYYARR-NH2 |
| 106 | Ac-IWIAQ$LRA$GDAFNAYYARR-NH2 |
| 107 | Ac-IWI$QEL$RIGDEFNAYYARR-NH2 |
| 108 | Ac-IWI$QAL$RIGDEFNAYYARR-NH2 |
| 109 | Ac-IWI$QEL$RIGDAFNAYYARR-NH2 |
| 110 | Ac-IWI$QAL$RIGDAFNAYYARR-NH2 |
| 111 | Ac-IWIAQALR$IGD$ANAYYARR-NH2 |
| 112 | Ac-RWIAQALR$IGD$FNAYYARR-NH2 |
| 113 | Ac-RNIAQELR$IGD$FNAYYARR-NH2 |
| 114 | Ac-RNIAQALR$IGD$FNAYYARR-NH2 |
| 115 | Ac-RRIAQALR$IGD$FNAYYARR-NH2 |
| 116 | Ac-RNIAQALR$IGD$ANAYYARR-NH2 |
| 117 | Ac-RRIAQALR$IGD$ANAYYARR-NH2 |
| 118 | H-IWIAQELR$IGD$FNAYYARR-NH2 |
| 119 | Ac-IWIAQEChaR$IGD$FNAYYARR-NH2 |
| 120 | Ac-IWChgAQELR$IGD$FNAYYARR-NH2 |
| 121 | Ac-IRIAQALR$IGD$FNAYYARR-NH2 |
| 122 | Ac-IWIAQAibLR$IGD$FNAYYARR-NH2 |
| 123 | Ac-IWIAibQALR$IGD$FNAYYARR-NH2 |
| 124 | Ac-IWIAQALR$IGD$FNAibYYARR-NH2 |
| 125 | Ac-IWIAQALR$IGD$FNAYYAibRR-NH2 |
| 126 | Ac-IWIAQALR$IGD$FNASIARR-NH2 |
| 127 | Ac-IWIAQALR$IGD$FNAFYARR-NH2 |
| 128 | Ac-IWIAQALR$IGD$FNAFFARR-NH2 |
| 129 | Ac-IWIAQALR$IGD$FNARRA-NH2 |
| 130 | Ac-IWIAQALR$IGD$FNAYKA-NH2 |
| 131 | Ac-IWIAQALR$IGD$FNAYK-NH2 |
| 132 | Ac-IWIAQALR$IGD$FNASKARR-NH2 |
| 133 | Ac-RRIAQQLR$IGD$ANAYYARR-NH2 |
| 134 | Ac-WIAQQLR$IGD$FNAYYARR-NH2 |
| 135 | Pr-WIAQQLR$IGD$FNAYYARR-NH2 |
| 136 | Ac-RWIAQQLR$IGN$FNAYYARR-NH2 |
| 137 | H-NMeRWIAQQLR$IGD$FNAYYARR-NH2 |
| 138 | Ac-NMeRWIAQQLR$IGD$FNAYYARR-NH2 |
| 139 | Ac-IWIAQHLR$IGD$FNAYYARR-NH2 |
| 140 | Ac-RWIAQHLR$IGD$FNAYYARR-NH2 |
| 141 | Ac-RWIAQELR$ChgGD$FNAYYARR-NH2 |
| 142 | Ac-RWIAQELR$ChaGD$FNAYYARR-NH2 |
| 143 | Ac-IWIAQQLR$IGD$FNAFFARR-NH2 |
| 144 | Ac-RWIAQQLR$IGD$FNAFYARR-NH2 |
| 145 | Ac-RWIAQQLR$IGD$FNAYFARR-NH2 |
| 146 | Ac-RWIAQQLR$IGD$FNATIARR-NH2 |
| 147 | Ac-RWIAQQLR$IGD$FNAYYAR-NH2 |
| 148 | Ac-RWIAQQLR$IGD$FNAYYA-NH2 |
| 149 | Ac-RWIAQQLR$IGD$FNAYY-NH2 |
| 150 | Ac-IWIAQ$LRR$GDQFNAYYARR-NH2 |
| 151 | Ac-IWIAQ$LRQ$GDQFNAYYARR-NH2 |
| 152 | Ac-RWIAQ$LRA$GDQFNAYYARR-NH2 |
| 153 | H-CBaIWIAQELRRIGDEFNAYYARR-NH2 |
| 154 | H-CBaIWIAQELRRIGDEFNAYYARR-NH2 |
| 155 | H-CBaIWIAQELR$IGD$FNAYYARR-NH2 |
| 156 | H-CBaIWIAQELR$IGD$FNAYYARR-NH2 |
| 157 | Ac-RRIAQQLR$IGD$FNAYYAR-NH2 |
| 158 | Ac-RRIAQALR$IGD$FNAYYAR-NH2 |
| 159 | Ac-RRIAQQLR$IGD$FNAYYA-NH2 |
| 160 | Ac-IWIAQQLR$IGD$FNARRA-NH2 |
| 161 | Ac-RWIAQQLR$IGD$FNARRA-NH2 |
| 162 | Ac-RRIAQQLR$IGD$FNARRA-NH2 |
| 163 | Ac-RRIAQQLR$IGD$FNARRA-NH2 |
| 164 | Ac-RWIAQQLR$IGD$FNARYA-NH2 |
| 165 | Ac-RWIAQQLR$IGD$FNAYRA-NH2 |
| 166 | Ac-RWIAQQLR$IGD$FNARYA-NH2 |
| 167 | Ac-RWIAQQLR$IGD$FNAYRA-NH2 |
| 168 | Ac-RRIAQQLR$IGD$FNASIA-NH2 |
| 169 | Ac-RRIAQALR$IGD$FNASIA-NH2 |
| 170 | Ac-RRIAQALR$IGD$FNASI-NH2 |
| 171 | Ac-RWIAQQLR$IGD$FNARR-NH2 |
| 172 | Ac-RWIAQQLR$IGD$FNAR-NH2 |
| 173 | Ac-RRIAQQLR$IGD$FNAR-NH2 |
| 174 | Ac-RRIAQQLR$IGD$FNAib-NH2 |
| 175 | Ac-RRIAQQLR$IGD$FNA-NH2 |
| 176 | Ac-RRIAQQLR$IGD$FNARRA-NH2 |
| 177 | Ac-RRIAQQLR$IGD$FNAYYA-NH2 |
| 178 | Ac-RRIAQQLR$IGD$FNAYYAib-NH2 |
| 179 | Ac-RWIAQQLR$IGD$FNAibRRA-NH2 |
| 180 | Ac-RWIAibQQLR$IGD$FNARRA-NH2 |
| 181 | Ac-RWAibAQQLR$IGD$FNARRA-NH2 |
| 182 | Ac-RAibIAQQLR$IGD$FNARRA-NH2 |
| 183 | Ac-RFIAQQLR$IGD$FNAYYARR-NH2 |
| 184 | Ac-RFIAQQLR$IGD$FNARRA-NH2 |
| 185 | Ac-RAibIAQQLR$IGD$FNAYYARR-NH2 |
| 186 | Ac-RWIAQQhFR$IGD$FNAYYARR-NH2 |
| 187 | Ac-RWIAQQ3cfR$IGD$FNAYYARR-NH2 |
| 188 | Ac-RWIAQQ1NalR$IGD$FNAYYARR-NH2 |
| 189 | Ac-RWIAQQ2NalR$IGD$FNAYYARR-NH2 |
| 190 | Ac-IWIAQEAR$IGD$ANAYYARR-NH2 |
| 191 | Ac-RRI$QAL$RIGDAibFNARRA-NH2 |
| 192 | Ac-RRIAQ$LRR$GDAibFNARRA-NH2 |
| 193 | iBu-RWIAQQLR$IGD$FNAYYARR-NH2 |
| 194 | Dec-RWIAQQLR$IGD$FNAYYARR-NH2 |
| 195 | Bz-RWIAQQLR$IGD$FNAYYARR-NH2 |
| 196 | H-RWIAQQLR$IGD$FNAYYARR-NH2 |
| 197 | Chx-RWIAQQLR$IGD$FNAYYARR-NH2 |
| 198 | Vrl-RWIAQQLR$IGD$FNAYYARR-NH2 |
| 199 | PhAc-RWIAQQLR$IGD$FNAYYARR-NH2 |
| 200 | MeImC-RWIAQQLR$IGD$FNAYYARR-NH2 |
| 201 | Pr-RWIAQQLR$IGD$FNAYYARR-NH2 |
| 202 | Ac-RWIAQALR$IGD$FNASIARR-NH2 |
| 203 | Ac-RWIAQQLR$IGD$FNASIARR-NH2 |
| 204 | Ac-RWIAQALR$IGD$FNAFYARR-NH2 |
| 205 | Ac-RRIAQALR$IGD$FNAFYA-NH2 |
| 206 | Ac-RRIAQQLR$IGD$FNAFYA-NH2 |
| 207 | Ac-RWIAQALR$IGD$FNAYYARR-NHPr |
| 208 | Ac-RWIAQALR$IGD$FNAYYARR-NHiBu |
| 209 | Ac-RWIAQALR$IGD$FNAYYARR-NHChx |
| 210 | Ac-RWIAQALR$IGD$FNAYYARR-NHBn |
| 211 | Ac-RWIAQALR$IGD$FNAYYARR-NHMeChx |
| 212 | Ac-RWIAQALR$IGD$FNAYYARR-NHEtPh |
| 213 | Ac-RWIAQALR$IGD$FNAYYARR-NHsBu |
| 214 | Ac-RWIAQALR$IGD$FNARR-NHPr |
| 215 | Ac-RWIAQALR$IGD$FNARR-NHiBu |
| 216 | Ac-RWIAQALR$IGD$FNARR-NHChx |
| 217 | Ac-RWIAQALR$IGD$FNARR-NHBn |
| 218 | Ac-RWIAQALR$IGD$FNARR-NHMeChx |
| 219 | Ac-RWIAQALR$IGD$FNARR-NHEtPh |
| 220 | Ac-RWIAQALR$IGD$FNARR-NHsBu |
| 221 | Ac-RWIAQALR$IGA$FNAYYARR-NH2 |
| 222 | Ac-RWIAQALR$IGN$FNAYYARR-NH2 |
| 223 | Ac-IWIAQALR$IGA$FNARRA-NH2 |
| 224 | Ac-IWIAQALR$IGN$FNARRA-NH2 |
| 225 | Ac-RWIAQAFR$IGD$FNAYYARR-NH2 |
| 226 | H-CAhxIWIAQELRRIGDEFNAYYARR-NH2 |
| 227 | H-CAhxIWIAQELR$IGD$FNAYYARR-NH2 |
| 228 | Pr-IPIAQALR$IGD$FNARRA-NH2 |
| 229 | Pr-PWIAQALR$IGD$FNARRA-NH2 |
| 230 | KLH-CAhxIWIAQELRRIGDEFNAYYARR-NH2 |
| 231 | OVA-CAhxIWIAQELRRIGDEFNAYYARR-NH2 |
| 232 | KLH-CAhxIWIAQELR$IGD$FNAYYARR-NH2 |
| 233 | OVA-CAhxIWIAQELR$IGD$FNAYYARR-NH2 |
| 234 | Ac-IWIAEELA$IGD$FDAYYA-NH2 |
| 235 | FITC-BaIWIAEELA$IGD$FDAYYA-NH2 |
| 236 | Ac-IWIAEELA$IGD$FDAYYAAA-NH2 |
| 237 | FITC-BaIWIAEELA$IGD$FDAYYAAA-NH2 |
| 238 | Ac-RWIAQALR$IGD$FNAYKARR-NH2 |
| 239 | Ac-RWIAQQLR$IGD$FNAYKARR-NH2 |
| 240 | Ac-RWIAQALR$IGD$FNAYK-NH2 |
| 241 | Ac-RWIAQALR$IGD$FNAFK-NH2 |
| 242 | Ac-RWIAQALR$IGD$hFNAYYARR-NH2 |
| 243 | Ac-RWIAQALR$IGD$1NalNAYYARR-NH2 |
| 244 | Ac-RWIAQALR$IGD$2NalNAYYARR-NH2 |
| 245 | Ac-R2NalIAQALR$IGD$FNAYYARR-NH2 |
| 246 | Ac-RhFIAQALR$IGD$FNAYYARR-NH2 |
| 247 | Ac-RWIAQALR$IGNle$FNAYYARR-NH2 |
| 248 | Ac-RWNleAQALR$IGD$FNAYYARR-NH2 |
| 249 | Ac-RWIAQNleLR$IGD$FNAYYARR-NH2 |
| 250 | Ac-RWIAQQLR$IGD$FNAYK-NH2 |
| 251 | H-CAhxIWIAQELR$IED$FNAYYARR-NH2 |
| 252 | Ac-IWIAQALR$IGD$FNAYOrnARR-NH2 |
| 253 | Ac-IWIAQALR$IGD$FNAYOrn-NH2 |
| 254 | Ac-IWIAQALR$IGD$FNAYR-NH2 |
| 255 | Ac-IWIAQALR$IGD$FNAYRA-NH2 |
| 256 | Ac-IWIAQALR$IFD$FNARRA-NH2 |
| 257 | Ac-RWIAQALR$IGD$FNARRA-NH2 |
| 258 | Ac-IWIAQELR$ChgGD$FNAYYARR-NH2 |
| 259 | Ac-IWIAQQLR$IGD$FNAYY-NH2 |
| 260 | Ac-IWIAQ$LRA$GDQFNAYYARR-NH2 |
| 261 | Ac-IWIAQALR$IGD$FAibAYK-NH2 |
| 262 | Ac-IWIAQALR$IGD$FAibAYYARR-NH2 |
| 263 | Ac-IWIAQALR$IGN$FNAFYARR-NH2 |
| 264 | Ac-RWIAQALR$IGN$FNAFYARR-NH2 |
| 265 | Ac-IWIAQAibLR$IGN$FNAFYARR-NH2 |
| 266 | Ac-IWIAQALR$IGN$FNAibFYARR-NH2 |
| 267 | Ac-IWIAQAibLR$IGN$FNAibFYARR-NH2 |
| 268 | Pr-RNChgARHLA$VAibD$FNAFYARR-NH2 |
| 269 | Ac-IWIAQAAR$IGD$FNAYYARR-NH2 |
| 270 | Ac-IWIAQAAR$IGD$ANAYYARR-NH2 |
| 271 | Ac-IWIAQAAR$IGA$ANAYYARR-NH2 |
| 272 | Ac-IWIAQAAR$IEA$ANAYYARR-NH2 |
| 273 | Ac-IWIAQALR$DIG$FNAYYARR-NH2 |
| 274 | Ac-IWIAQAAR$DIG$ANAYYARR-NH2 |
| 275 | Ac-IWIAQALR$IED$FNAYYARR-NH2 |
| 276 | Ac-IWIAQALD$IGR$FNAYYARR-NH2 |
| 277 | Ac-IWIAQAAD$IGR$ANAYYARR-NH2 |
| 278 | Ac-IWIAQAAD$IER$ANAYYARR-NH2 |
| 279 | Ac-IWIAQAibLR$IGD$FNAibYYARR-NH2 |
| 280 | Ac-IWIAQQLR$IGD$FNAYRA-NH2 |
| 281 | Ac-IWI$QAL$RIGDAibFNAYYARR-NH2 |
| 282 | t-Bu-U-IWIAQELR$IGD$FNAYYARR-NH2 |
| 283 | non-U-IWIAQELR$IGD$FNAYYARR-NH2 |
| 284 | Et-U-IWIAQELR$IGD$FNAYYARR-NH2 |
| 285 | Chx-U-IWIAQELR$IGD$FNAYYARR-NH2 |
| 286 | iPr-U-IWIAQELR$IGD$FNAYYARR-NH2 |
| 287 | Ph-U-IWIAQELR$IGD$FNAYYARR-NH2 |
| 288 | NH2CO-IWIAQELR$IGD$FNAYYARR-NH2 |
| 289 | Ac-IWIAQAAR$IGR$ANAYYARR-NH2 |
| 290 | Ac-IWIAQAAD$IGD$ANAYYARR-NH2 |
| 291 | Ac-IWIAQALD$IGD$FNAYYARR-NH2 |
| 292 | Ac-IWIAQALR$IGR$FNAYYARR-NH2 |
| 293 | Ac-IWIAQAAR$IGD$ANAYYARR-NH2 |
| 294 | Ac-IWIAQAAD$IGR$ANAYYARR-NH2 |
| 295 | Ac-IWIAQALD$IGR$FNAYYARR-NH2 |
| 296 | Ac-IWIAQALRRIGDEFNAYYARR-NH2 |
| 297 | Ac-IWIAQALR$IGN$FNAYYARR-NH2 |
| 298 | Ac-IWIAQALR$IGNle$FNAYYARR-NH2 |
| 299 | Ac-IWIAQALR$IGA$FNAFYARR-NH2 |
| 300 | Ac-IWIAQALR$IGN$FNAFYARR-NH2 |
| 301 | Ac-IWIAQALR$IGNle$FNAFYARR-NH2 |
| 302 | Ac-RWIAQAFR$IGD$FNAFYARR-NH2 |
| 303 | Ac-IWIAQAFR$IGD$FNAFYARR-NH2 |
| 304 | Ac-IWIAQAFR$IGN$FNAYYARR-NH2 |
| 305 | Ac-IWIAQAFR$IGN$FNAFYARR-NH2 |
| 306 | Ac-IWIAQALR$IG$EFNAYYARR-NH2 |
| 307 | Ac-IWIAQALRR$GD$FNAYYARR-NH2 |
| 308 | Ac-IWIAQALRAibIGAmDEFNAYYARR-NH2 |
| 309 | Ac-IWIAQELR#IGD#FNAYYARR-NH2 |
| 310 | Ac-IWIAQELR$IGD#FNAYYARR-NH2 |
| 311 | Ac-IWIAQELR#IGD$FNAYYARR-NH2 |
| 312 | Ac-IWIAQALR$IGD$FNAYYARR-NHiBu |
| 313 | Chx-IWIAQALR$IGD$FNAYYARR-NHiBu |
| 314 | Chx-U-IWIAQALR$IGD$FNAYYARR-NHiBu |
| 315 | FITC-AhxIWIAQALR$IGD$FNAibYYARR-NH2 |
| 316 | FITC-AhxIWIAQALR$IGD$FNAFYARR-NH2 |
| 317 | FITC-AhxRWIAQALR$IGD$FNAFYARR-NH2 |
| 318 | FITC-AhxRWIAQALR$IGN$FNAYYARR-NH2 |
| 319 | FITC-AhxRWIAQALR$IGNle$FNAYYARR-NH2 |
| 320 | FITC-AhxIWIAQALR$IGN$FNAYYARR-NH2 |
| 321 | FITC-AhxIWIAQALR$IGNle$FNAYYARR-NH2 |
| 322 | Ac-IWIAQELRbKIGDbEFNAYYARR-NH2 |
| 323 | Ac-IWIAQELRbEIGDbKFNAYYARR-NH2 |
| 324 | Ac-IWIAQELRbKIAibDbEFNAYYARR-NH2 |
| 325 | Ac-IWIAQELRbEIAibDbKFNAYYARR-NH2 |
| 326 | Ac-IWIAQELR#sIGD#sFNAYYARR-NH2 |
| 327 | Ac-IWIAQELR#sIAibD#sFNAYYARR-NH2 |
| 328 | Ac-IWIAQELR$sIGD$sFNAYYARR-NH2 |
| 329 | Ac-IAmWIAQELR$IGD$FNAYYARR-NH2 |
| 330 | Ac-IWIAQELR$r5IGD$r5FNAYYARR-NH2 |
| 331 | Ac-IWIA$r5ELR$r5IGDEFNAYYARR-NH2 |
| 332 | Ac-IWIA$ELR$IGDEFNAYYARR-NH2 |
| 333 | Ac-IWIAQ$r8LRRIGD$FNAYYARR-NH2 |
| 334 | Ac-I$r8IAQELR$IGDEFNAYYARR-NH2 |
| 335 | HepIAQ$LRRIGDEFNAYYARR-NH2 |
| 336 | HepIAQ$LR$IGD$FNAYYARR-NH2 |
| 337 | HepWIA$ELRRIGDEFNAYYARR-NH2 |
| 338 | HepWIA$ELR$IGD$FNAYYARR-NH2 |
| 339 | Ac-I$IAQ$LRRIGDEFNAYYARR-NH2 |
| 340 | Ac-I$IAQ$LR$IGD$FNAYYARR-NH2 |
| 341 | Ac-IWIAQALE$IGD$FNAYYARR-NH2 |
| 342 | Ac-IWIAQALR$IGR$ANAYYARR-NH2 |
| 343 | Ac-IWIAQAAE$IGR$ANAYYARR-NH2 |
| 344 | Ac-IWIAQAAE$IGE$ANAYYARR-NH2 |
| 345 | Ac-RWIAQALR$IGR$FNAFYARR-NH2 |
| 346 | Ac-RWIAQALE$IGD$FNAFYARR-NH2 |
| 347 | Ac-RWIAQAAR$IGR$ANAFYARR-NH2 |
| 348 | Ac-RWIAQAAE$IGD$ANAFYARR-NH2 |
| 349 | Ac-RWIAQAAD$IGD$ANAFYARR-NH2 |
| 350 | Ac-RWIAQAAE$IGR$ANAFYARR-NH2 |
| 351 | Ac-RWIAQAAR$IGD$ANAFYARR-NH2 |
| 352 | Ac-RWIAQALR$DIG$FNAFYARR-NH2 |
| 353 | Ac-RWIAQALR$IGN$ANAYYARR-NH2 |
| 354 | Ac-RWIAQAAR$IGN$ANAYYARR-NH2 |
| 355 | Ac-RWIAQAAE$IGN$ANAYYARR-NH2 |
| 356 | Ac-RWIAQAAE$IGN$ANAYYARR-NH2 |
| 357 | Ac-RWIAQAAE$NIG$ANAYYARR-NH2 |
| 358 | Ac-RWIAQAAR$NIG$ANAYYARR-NH2 |
| 359 | Ac-IWIAQALR$IGN$ANAYYARR-NH2 |
| 360 | Ac-IWIAQAAR$IGN$ANAYYARR-NH2 |
| 361 | Ac-IWIAQAAE$IGN$ANAYYARR-NH2 |
| 362 | Ac-IWIAQAAE$IGN$ANAYYARR-NH2 |
| 363 | Ac-IWIAQAAE$NIG$ANAYYARR-NH2 |
| 364 | Ac-IWIAQAAR$NIG$ANAYYARR-NH2 |
| 365 | Ac-RWIAQALRRIGNEFNAYYARR-NH2 |
| 366 | Ac-IWIAQALRRIGNEFNAYYARR-NH2 |
| 367 | Ac-RWIAQALR$IEN$FNAYYARR-NH2 |
| 368 | Ac-RWIAQALR$IED$FNAFYARR-NH2 |
| 369 | Ac-IWIAQALR$IED$FNAFYARR-NH2 |
| 370 | Ac-IWIAQELR$IGR$FNAYYARR-NH2 |
| 371 | Ac-IWIAQELRbKIGDbDFNAYYARR-NH2 |
| 372 | Ac-IWIAQELRbDIGDbKFNAYYARR-NH2 |
| 373 | FITC-AhxRWIAQALRRIGDEFNAFYARR-NH2 |
| 374 | FITC-AhxRWIAQALRRIGNEFNAYYARR-NH2 |
| 375 | FITC-AhxIWIAQALRRIGNEFNAYYARR-NH2 |
| 376 | FITC-AhxIWIAQELRRIGDEFNAYYARR-NH2 |
| 377 | Ac-RWIAQALR$/IGN$/FNAYYARR-NH2 |
| 378 | Ac-IWIAQELR#cIGR#cFNAYYARR-NH2 |
| 379 | Ac-IWIAQELRCIGRCFNAYYARR-NH2 |
| 380 | FITC-AhxIWIAQAAR$DIG$ANAYYARR-NH2 |
| 381 | Ac-IWIAQQLR%IGD%FNAYYARR-NH2 |
| 382 | FITC-AhxRNIARHLA$VGD$NleAibRSI-NH2 |
| 383 | FITC-AhxIWIAQALR$IGD$FNAYYARR-NH2 |
| 384 | Ac-IWIAQELR#c4IGD#c4FNAYYARR-NH2 |
| 385 | Ac-IWIAQELR$c4IGD$c4FNAYYARR-NH2 |
| 386 | Ac-IWIAQELR#cIGD#cFNAYYARR-NH2 |
| 387 | Ac-IWIAQELR$cIGD$cFNAYYARR-NH2 |
| 388 | FITC-AhxIWIAQELR#IGD#FNAYYARR-NH2 |
| 389 | 5-FAM-AhxIWIAQELR#c4IGD#c4FNAYYARR-NH2 |
| 390 | 5-FAM-AhxIWIAQELR$c4IGD$c4INAYYARR-NH2 |
| 391 | FITC-AhxIWIAQELR#cIGD#cFNAYYARR-NH2 |
| 392 | FITC-AhxIWIAQELR#sIGD#sFNAYYARR-NH2 |
| 393 | FITC-AhxIWIAQELR$cIGD$cFNAYYARR-NH2 |
| 394 | Ac-IWIAQELR$4n4IGD$4a5FNAYYARR-NH2 |
| 395 | Ac-IWIAQELR$4a5IGD$4n4FNAYYARR-NH2 |
| 396 | Ac-IWIAQELR$5n3IGD$5a5FNAYYARR-NH2 |
| 397 | Ac-IWIAQELR$5a5IGD$5n3FNAYYARR-NH2 |
| 398 | Ac-IWIAQELR#5n3IGD#5a5FNAYYARR-NH2 |
| 399 | Ac-IWIAQELR#5a5IGD#5n3FNAYYARR-NH2 |
| 400 | FITC-AhxIWIAQELR$4n4IGD$4a5FNAYYARR-NH2 |
| 401 | FITC-AhxIWIAQELR$4a5IGD$4n4FNAYYARR-NH2 |
| 402 | FITC-AhxIWIAQELR$5n3IGD$5a5FNAYYARR-NH2 |
| 403 | FITC-AhxIWIAQELR$5a5IGD$5n3FNAYYARR-NH2 |
| 404 | FITC-AhxIWIAQELR#5n3IGD#5a5FNAYYARR-NH2 |
| 405 | FITC-AhxIWIAQELR#5a5IGD#5n3FNAYYARR-NH2 |
| 406 | Ac-IWIAQALR$IEN$FNAYYARR-NH2 |
| 407 | Ac-RWIAQALR$/IGD$/FNAFYARR-NH2 |
| 408 | Ac-IWIAQALR$/IGN$/FNAYYARR-NH2 |
| 409 | Ac-IWIAQALR$/IGD$/FNAYYARR-NH2 |
| 410 | Ac-RWIChaQALR$IGD$FNAFYARR-NH2 |
| 411 | Ac-RWIAQALR$IChaD$FNAFYARR-NH2 |
| 412 | Ac-RWIAQALR$IGD$FNAFYARR-NH2 |
| 413 | Ac-RWIAQALR$IGD$FNChaFYARR-NH2 |
| 414 | Ac-RWIAQALR$IGD$FNAFYChaRR-NH2 |
| 415 | Ac-IWIChaQALR$IGN$FNAYYARR-NH2 |
| 416 | Ac-IWIAQALR$IChaN$FNAYYARR-NH2 |
| 417 | Ac-IWIAQALR$IGN$FNAYYARR-NH2 |
| 418 | Ac-IWIAQALR$IGN$FNChaYYARR-NH2 |
| 419 | Ac-IWIAQALR$IGN$FNAYYChaRR-NH2 |
| 420 | HepIAQ$LR$IGD$FNAFYARR-NH2 |
| 421 | Ac-YGRKKRRQRRRIWIAQELRRIGDEFNAYYARR-NH2 |
| 422 | FITC-AhxYGRKKRRQRRRIWIAQELRRIGDEFNAYYARR- |
| | NH2 |
| 423 | Ac-RWIAQALR$IGD$FNAFYAHR-NH2 |
| 424 | Ac-RWIAQALR$IGD$FNAFYARH-NH2 |
| 425 | Ac-RWIAQSLR$IGD$FNAFYARR-NH2 |
| 426 | Ac-IWIAQELR#4n4IGD#4a5FNAYYARR-NH2 |
| 427 | FITC-AhxRWIAQALR$/IGN$/FNAYYARR-NH2 |
| 428 | FITC-AhxRWIAQALR$/IGD$/FNAFYARR-NH2 |
| 429 | FITC-AhxIWIAQALR$/IGN$/FNAYYARR-NH2 |
| 430 | FITC-AhxIWIAQALR$/IGD$/FNAYYARR-NH2 |
| 431 | FITC-AhxIWIAQELR$sIGD$sFNAYYARR-NH2 |
| 432 | Biotin-AhxRWIAQALRRIGDEFNAFYARR-NH2 |
| 433 | Biotin-AhxRWIAQALRRIGNEFNAYYARR-NH2 |
| 434 | Biotin-AhxIWIAQALRRIGNEFNAYYARR-NH2 |
| 435 | Biotin-AhxIWIAQALRRIGDEFNAYYARR-NH2 |
| 436 | FITC-AhxIWIAQALRRIGDEFNAYYARR-NH2 |
| 437 | Biotin-AhxRWIAQALR$IGD$FNAFYARR-NH2 |
| 438 | Biotin-AhxRWIAQALR$IGN$FNAYYARR-NH2 |
| 439 | Biotin-AhxIWIAQALR$IGN$FNAYYARR-NH2 |
| 440 | Biotin-AhxIWIAQALR$IGD$FNAYYARR-NH2 |
| 441 | Biotin-AhxIWIAQALR$IGD$FNAFYARR-NH2 |
| 442 | 5-FAM-AhxIWIAQELR$IGD$FNAYYARR-NH2 |
| 443 | DuIAQDprLRRIGDEFNAYYARR-NH2 |
| 444 | DuIAQDprLRRIGDQFNAYYARR-NH2 |
| 445 | DuWIADprALRRIGDEFNAYYARR-NH2 |
| 446 | DuWIADprALRRIGDQFNAYYARR-NH2 |
| 447 | 5-FAM-AhxIWIAQALRRIGDEFNAYYARR-NH2 |
| 448 | 5-FAM-AhxIWIAQALR$IGD$FNAYYARR-NH2 |
| 449 | 5-FAM-AhxIWIAQAARRDIGEANAYYARR-NH2 |
| 450 | 5-FAM-AhxRWIAQALR$IGD$FNAFYARR-NH2 |
| 451 | 5-FAM-AhxIWIAQALRRIGDEFNAFYARR-NH2 |
| 452 | Ac-IWIAQEAmLR$IGD$FNAYYARR-NH2 |
| 453 | Ac-IWIAQELR$IGD$FNAibYYARR-NH2 |
| 454 | Ac-IWIAQELR$IGD$FNAAmfYARR-NH2 |
| 455 | Ac-IWIAQELR$IGD$FNAYAmfARR-NH2 |
| 456 | Ac-IWIAQELR$IGD$FNAAmyeYARR-NH2 |
| 457 | Ac-IWIAQELR$IGD$FNAYAmyeARR-NH2 |
| 458 | Ac-IWIAQELR$IGD$FNAYYAAmrR-NH2 |
| 459 | Ac-IWIAQELR$IGD$FNAYFARR-NH2 |
| 460 | Ac-IWIAQELR$IGD$FNAFYARR-NH2 |
| 461 | Ac-RWIAQELR$IGD$FNAFYARR-NH2 |
| 462 | Ac-RWIAQALR$IGD$FNAAmfYARR-NH2 |
| 463 | Ac-RWIAQALR$IGD$FNAFYAAmrR-NH2 |
| 464 | Ac-IWIA$r5ALRStIGD$FNAYYARR-NH2 |
| 465 | Ac-IWIA$ALRStIGDEFN$s8YYARR-NH2 |
| 466 | Ac-IWIAQALR$r5IGDStFNA$YARR-NH2 |
| 467 | 5-FAM-AhxIWIAQELRbKIGDbDFNAYYARR-NH2 |
| 468 | 5-FAM-AhxIWIAQELRbDIGDbKFNAYYARR-NH2 |
| 469 | 5-FAM-AhxIWIAQELR#IGD#FNAYYARR-NH2 |
| 470 | 5-FAM-AhxIWIAQELR#cmlIGD#cmlFNAYYARR-NH2 |
| 471 | 5-FAM-AhxRWIAQALR$IGD$FNAFYAHR-NH2 |
| 472 | 5-FAM-AhxRWIAQALRRIGDEFNAFYAHR-NH2 |
| 473 | 5-FAM-AhxRWIAQALR$IGD$FNAFYARH-NH2 |
| 474 | 5-FAM-AhxRWIAQALRRIGDEFNAFYARH-NH2 |
| 475 | Ac-RWIAQALR$IGD$FNAFYAAR-NH2 |
| 476 | Ac-RWIAQALR$IGD$FNAFYARA-NH2 |
| 477 | Ac-RWIAQAAR$DIG$ANAFYARR-NH2 |
| 478 | Ac-IWIAQAAR$DIG$ANAFYARR-NH2 |
| 479 | 5-FAM-AhxIWIAQELR$IED$FNAYYARR-NH2 |
| 480 | 5-FAM-AhxIWIAQELRRIEDEFNAYYARR-NH2 |
| 481 | Ac-IWIAQELRNleIGDNleFNAYYARR-NH2 |
| 482 | Ac-IWIAQELRAibIGDAibFNAYYARR-NH2 |
| 483 | 5-FAM-AhxRWIAQALR$IGD$FNAFYARR-NH2 |
| 484 | 5-FAM-AhxRWIAQALRRIGDEFNAFYARR-NH2 |
| 485 | H-CAhxIWIAQALR$IGD$FNAFYARR-NH2 |
| 486 | H-CAhxRWIAQALR$IGD$FNAFYARR-NH2 |
| 487 | 5-FAM-AhxIWIAQALR$IGD$FNAFYARR-NH2 |
| 488 | OVA-CAhxIWIAQELR$IGD$FNAYYARR-NH2 |
| 489 | OVA-CAhxRWIAQQLR$IGD$FNAYYARR-NH2 |
| 490 | H-CAhxRWIAQAAR$IGR$ANAFYARR-NH2 |
| 491 | H-CAhxRWIAQALR$IGD$FNAYYARR-NH2 |
| 492 | H-CAhxIWIAQALRRIGDEFNAYYARR-NH2 |
| 493 | OVA-CAhxRWIAQAAR$IGD$ANAYYARR-NH2 |
| 494 | OVA-CAhxRWIAQALR$IGD$FNAYYARR-NH2 |
| 495 | OVA-CAhxIWIAQALRRIGDEFNAYYARR-NH2 |
| 496 | Ac-6xhAhxIWIAQAAR$DIG$ANAYYARR-NH2 |
| 497 | Ac-FlagAhxIWIAQAAR$DIG$ANAYYARR-NH2 |
| 498 | 5-FAM-6xhAhxIWIAQAAR$DIG$ANAYYARR-NH2 |
| 499 | 5-FAM-FlagAhxIWIAQAAR$DIG$ANAYYARR-NH2 |
| 500 | Ac-6xhAhxRWIAQALR$IGD$FNAFYARR-NH2 |
| 501 | Ac-FlagAhxRWIAQALR$IGD$FNAFYARR-NH2 |
| 502 | 5-FAM-6xhAhxRWIAQALR$IGD$FNAFYARR-NH2 |
| 503 | 5-FAM-FlagAhxRWIAQALR$IGD$FNAFYARR-NH2 |
| 504 | 5-FAM-IWIAQELR$IGD$FNAYYARR-NH2 |
| 505 | 5-FAM-BaIWIAQELR$IGD$FNAYYARR-NH2 |
| 506 | Ac-IWIAQELR%OcoIGD%OcoFNAYYARR-NH2 |
| 507 | Ac-AhxIWIAQELR$IGD$FNAYYARR-NH2 |
| 508 | Ac-BaIWIAQELR$IGD$FNAYYARR-NH2 |
| 509 | H-CAhxIWIAQALR$IGD$FNAYYARR-NH2 |
| 510 | 5-FAM-AhxIWIAQELR$/IGD$/FNAYYARR-NH2 |
| 511 | Ac-RWIAQALRRIGDEFNAFYAHH-NH2 |
| 512 | 5-FAM-AhxRWIAQALR$IGD$FNAFYAHH-NH2 |
| 513 | 5-FAM-AhxIWIAQELRRIGDEFNAYYARR-NH2 |
| 514 | Ac-TatAhxIWIAQELRRIGDEFNAYYARR-NH2 |
| 515 | 5-FAM-TatAhxIWIAQELRRIGDEFNAYYARR-NH2 |
| 516 | Ac-TatAhxIWIAQELR$IGD$FNAYYARR-NH2 |
| 517 | 5-FAM-TatAhxIWIAQELR$IGD$FNAYYARR-NH2 |
| 518 | Ac-TatAhxRWIAQALR$IGD$FNAFYARR-NH2 |
| 519 | 5-FAM-TatAhxRWIAQALR$IGD$FNAFYARR-NH2 |
| 520 | Ac-TatAhxRWIAQALRRIGDEFNAFYARR-NH2 |
| 521 | 5-FAM-TatAhxRWIAQALRRIGDEFNAFYARR-NH2 |
| 522 | 5-FAM-AhxRWIAQALR$/IGD$/FNAFYARR-NH2 |
| 523 | 5-FAM-AhxIWIAQALR$/IGD$/FNAFYARR-NH2 |
| 524 | Ac-TatAhxIWIAQELR$IED$FNAYYARR-NH2 |
| 525 | 5-FAM-TatAhxIWIAQELR$IED$FNAYYARR-NH2 |
| 526 | Ac-IWIAQELRRIEDDFNAYYARR-NH2 |
| 527 | Ac-TatAhxIWIAQELRRIEDDFNAYYARR-NH2 |
| 528 | 5-FAM-TatAhxIWIAQELRRIEDDFNAYYARR-NH2 |
| 529 | Ac-IWIAQELR$/IED$/FNAYYARR-NH2 |
| 530 | 5-FAM-AhxIWIAQELR$/IED$/FNAYYARR-NH2 |
| 531 | 5-FAM-AhxIWIAQAAR$DIG$ANAYYARR-NH2 |
| 532 | Ac-TatAhxIWIAQAAR$DIG$ANAYYARR-NH2 |
| 533 | 5-FAM-TatAhxIWIAQAAR$DIG$ANAYYARR-NH2 |
| 534 | Ac-IWIAQAARRDIGEANAYYARR-NH2 |
| 535 | Ac-TatAhxIWIAQAARRDIGEANAYYARR-NH2 |
| 536 | 5-FAM-TatAhxIWIAQAARRDIGEANAYYARR-NH2 |
| 537 | Ac-IWIAQAAR$DIG$ANAYYARR-NH2 |
| 538 | 5-FAM-AhxIWIAQAAR$/DIG$/ANAYYARR-NH2 |
| 539 | Ac-IWIAQELRRIEDEFNAYYARR-NH2 |
| 540 | Ac-IWIAQALR$/IGD$/FNAFYARR-NH2 |
| 541 | Ac-RWIAQALR$IGD$FNAFYAHH-NH2 |
| 542 | TatAhxIWIAQELRRIGDEFNAYYARR-NH2 |
| 543 | 5-FAM-TatAhxIWIAQELRRIEDEFNAYYARR-NH2 |
| 544 | Ac-IWIAQALRRI$DEF$AYYARR-NH2 |
| 545 | Ac-IWIAQALR$r8IGDEFN$YYARR-NH2 |
| 546 | Ac-IWIAQELRRIEDEFNAYYARR-NH2 |
| 547 | Ac-IWIAQELR$/IED$/FNAYYARR-NH2 |
| 548 | Ac-IWIAQAARRDIGEANAYYARR-NH2 |
| 549 | Ac-IWIAQAAR$/DIG$/ANAYYARR-NH2 |
| 550 | Ac-IWIAQALR$/IGD$/FNAFYARR-NH2 |
| 551 | Ac-RWIAQALR$IGD$FNAFYAHH-NH2 |
| 552 | Ac-IWIAQALRRIGDEFNAFYARR-NH2 |
| 553 | 5-FAM-AhxIWIAQALR$r8IGDEFN$YYARR-NH2 |
| 554 | Ac-RWIAQALR$IGD$FNA-OH |
| 555 | Ac-RWIAQALR$IGD$FNAFYA-OH |
| 556 | Ac-RWIAQALR$IGD$FNAF-OH |
| 557 | Ac-RWIAQALR$IGD$FNAFYARAmr-NH2 |
| 558 | 5-FAM-AhxIWIAQALR$/r8IGDEFN$/YYARR-NH2 |
| 559 | Ac-IWIAQALR$/r8IGDEFN$/YYARR-NH2 |
| 560 | OVA-CAhxIWIAQALR$IGD$FNAYYARR-NH2 |
| 561 | Ac-IWIA$ALR$IGDEFNAYYARR-NH2 |
| 562 | Ac-IWIA$/ALR$/IGDEFNAYYARR-NH2 |
| 563 | 5-FAM-AhxIWIA$/r5ALRSt//IGD$/FNAYYARR-NH2 |
| 564 | 5-FAM-AhxIWIA$ALRStIGDEFN$s8YYARR-NH2 |
| 565 | HepIAQ$LR$IGD$FNAYYARRTag5-FAM |
| 566 | 5-FAM-AhxIWIA$/ALRSt//IGDEFN$/s8YYARR-NH2 |
| 567 | 5-FAM-AhxIWIA$r5ALRStIGD$FNAYYARR-NH2 |
| 568 | Ac-AAARAAARAAA$AAA$AAAAA-NH2 |
| 569 | Ac-AAAAAAAR$AAA$AAAAAARA-NH2 |
| 570 | Ac-AAARAAARAAAKAAAEAAAAA-NH2 |
| 571 | Ac-AAAAAAARKAAAEAAAAAARA-NH2 |
| 572 | Ac-AAARAAAAAARAAAAA-NH2 |
| 573 | Ac-IWIAQELR%OIGD%OFNAYYARR-NH2 |
| 574 | Ac-IWIA$/r5ALRSt//IGD$/FNAYYARR-NH2 |
| 575 | Ac-IWIA$/ALRSt//IGDEFN$/s8YYARR-NH2 |
| 576 | Ac-I$r8IAQALR$IGDEFNAYYARR-NH2 |
| 577 | Ac-IWIAQALRRIG$r8EFNAYY$RR-NH2 |
| 578 | Ac-I$/r8IAQALR$/IGDEFNAYYARR-NH2 |
| 579 | Ac-IWIAQALRRIG$/r8EFNAYY$/RR-NH2 |
| 580 | Ac-RWIAQALR$IGD$FNAFYAibRR-NH2 |
| 581 | Ac-RWIAQALR$IGD$FNASYARR-NH2 |
| 582 | Ac-RWIAQALR$r5IGD$r5FNAFYARR-NH2 |
| 583 | Ac-IWIAQALRRIGDEF$AYY$RR-NH2 |
| 584 | Ac-RWIAEALR$IGD$FNAFYARR-NH2 |
| 585 | Ac-RWIAEALR$IGD$FDAFYARR-NH2 |
| 586 | Ac-RWIAQALR$/r5IGD$/FNAFYARR-NH2 |
| 587 | Ac-RWIAQALR$/IGD$/r5FNAFYARR-NH2 |
| 588 | Ac-IWIAQALRRIG$EFN$YYARR-NH2 |
| 589 | Ac-IWIAQALRRIGD$FNA$YARR-NH2 |
| 590 | Ac-IWIAQALRRIGDE$NAY$ARR-NH2 |
| 591 | Ac-IWIAQALRRIGD$r8FNAYYA$R-NH2 |
| 592 | %HepIAQ%LR%IGD%FNAYYARR-NH2 |
| 593 | Ac-SYDDALLMLRSIGDSL-NH2 |
| 594 | Ac-TEMMLAIMLRGIGDSL-NH2 |
| 595 | Ac-WVSEFLAIGDYVDFHY-NH2 |
| 596 | Ac-DLPVFILRNIGDSLIG-NH2 |
| 597 | Ac-VSDFDDFLTSVLDIYL-NH2 |
| 598 | 5-FAM-AhxIWIA$ALR$IGDEFNAYYARR-NH2 |
| 599 | 5-FAM-AhxIWIAQALRRIGDEF$AYY$RR-NH2 |
| 600 | 5-FAM-AhxI$IAQ$LRRIGDEFNAYYARR-NH2 |
| 601 | 5-FAM-AhxI$IAQ$LR$IGD$FNAYYARR-NH2 |
| 602 | 5-FAM-AhxIWIAQALRRIG$EFN$YYARR-NH2 |
| 603 | 5-FAM-AhxIWIAQALRRIGD$FNA$YARR-NH2 |
| 604 | 5-FAM-AhxIWIAQALRRIGDE$NAY$ARR-NH2 |
| 605 | 5-FAM-AhxI$r8IAQALR$IGDEFNAYYARR-NH2 |
| 606 | 5-FAM-AhxIWIAQALRRIGD$r8FNAYYA$R-NH2 |
| 607 | 5-FAM-AhxIWIAQALRRIGD$r8FNAYYA$R-NH2 |
| 608 | Ac-RWIAQALR$IGD$FDAFYARR-NH2 |
| 609 | Ac-IWIA$ALRStIGD$r5FNAYYARR-NH2 |
| 610 | Ac-IWIAQALR$IGDStFNA$r5YARR-NH2 |
| 611 | Ac-RWIA$ALRStIGD$r5FNAFYARR-NH2 |
| 612 | Ac-RWIAQALR$IGDStFNA$r5YARR-NH2 |
| 613 | Ac-TENleNleLAINleLR$IGD$L-NH2 |
| 614 | Ac-WVSEFL$IGD$VDFHY-NH2 |
| 615 | Ac-DLPVFILR$IGD$LIG-NH2 |
| 616 | Ac-VSDFDDFLT$VLD$YL-NH2 |
| 617 | Ac-RWIAQALR$trIGD$trFNAFYARR-NH2 |
| 618 | Ac-RWIAQALR$r5IGDStFNA$YARR-NH2 |
| 619 | Ac-RWIAQALR$IGD$FNAibFYARR-NH2 |
| 620 | Ac-RWIAQALR$IGD$FNAibFYAibRR-NH2 |
| 621 | Ac-PEG3RWIAQALR$IGD$FNAFYARR-NH2 |
| 622 | Ac-RWIAQALR$IGD$FNAFYAibHH-NH2 |
| 623 | Ac-RWIAQALR$IGD$FNAibFYAHH-NH2 |
| 624 | Ac-RWIAQALR$IGD$FNAibFYAibHH-NH2 |
| 625 | Ac-RWIAQALR$IGD$FNAAmfYAHH-NH2 |
| 626 | Ac-RWIAQALR$r5IGD$FNAFYARR-NH2 |
| 627 | Ac-RWIAQALR$IGD$r5FNAFYARR-NH2 |
| 628 | Ac-RWIAQALR$IGD$FNAFYARRPEG3-NH2 |
| 629 | Ac-RWIAQ$r8LRRIGDStFNAFYA$s8R-NH2 |
| 630 | Ac-R$r8IAQALRStIGDEFN$s8FYARR-NH2 |
| 631 | Ac-RWIAQALR$IGD$FNADamfYARR-NH2 |
| 632 | Ac-RWIAQALRbDIGDbKFNAFYARR-NH2 |
| 633 | Ac-RWIAQALRbKIGDbDFNAFYARR-NH2 |
| 634 | Ac-RWIAQALR$IAibD$FNAFYARR-NH2 |
| 635 | Ac-R$r5IGDStFNA$YARR-NH2 |
| 636 | Ac-RWIA$ALRStIGD$r5FNAAmfYARR-NH2 |
| 637 | Ac-RWIA$r5ALRStIGD$FNAAmfYARR-NH2 |
| 638 | Ac-IWIA$ALRStIGD$r5FNAAmfYARR-NH2 |
| 639 | Ac-IWIA$r5ALRStIGD$FNAAmfYARR-NH2 |
| 640 | Ac-RWIAQQLR$IGD$FNAFYAHH-NH2 |
| 641 | Ac-RWIAQALR#c4IGD#c4FNAFYARR-NH2 |
| 642 | Ac-RWIAQALR#c4eIGD#c4eFNAFYARR-NH2 |
| 643 | Ac-RWIAQLLR$IGD$FNAFYARR-NH2 |
| 644 | Ac-RWIAQALR$IGD$FNAhFYARR-NH2 |
| 645 | Ac-RWIAQALR$IGD$FNAAmfYAAmrR-NH2 |
| 646 | Biotin-IWIAQELR$IGD$FNAYYARR-NH2 |
| 647 | 5-FAM-AhxIWIA$/ALR$/IGDEFNAYYARR-NH2 |
| 648 | 5-FAM-AhxRWIAQALR$DIG$FNAFYARR-NH2 |
| 649 | Ac-RWIAQALR$IGD$FNAFYARR-OH |
| 650 | Ac-IWIAQALR$5a5IGD$5n3FNAYYARR-NH2 |
| 651 | Ac-RWIAQQFR$IGD$FNAYYARR-NH2 |
| 652 | Ac-RWIAQQLR$IGD$FNAFYAHR-NH2 |
| 653 | Ac-RWIAQQLR$IGD$FNAFYARH-NH2 |
| 654 | Ac-RWIAQQLRRIGDEFNAFYAHH-NH2 |
| 655 | Pr-WIAQQLR$IGD$FNAFYARR-NH2 |
| 656 | Ac-WIAQQLR$IGD$FNAYYAR-NH2 |
| 657 | Ac-WIAQQLR$IGD$FNAFYAR-NH2 |
| 658 | Ac-IWIAQELD$IGD$FNAYYARR-NH2 |
| 659 | Ac-RWIAQALD$IGD$FNAFYARR-NH2 |
| 660 | Ac-IWIAQLLR$IGD$FNAFYARR-NH2 |
| 661 | Ac-RWIAQQLR$IGD$1NalNAYYARR-NH2 |
| 662 | Ac-RWIAQLLR$IGD$1NalNAYYARR-NH2 |
| 663 | Ac-RWIAQALR$IGD$1NalNAFYARR-NH2 |
| 664 | Ac-RWIAQALR$5n3IGD$5a5FNAFYARR-NH2 |
| 665 | Ac-RWIAQALR$5a5IGD$5n3FNAFYARR-NH2 |
| 666 | Ac-RWIAQALR$/n3IGD$/a5FNAFYARR-NH2 |
| 667 | Ac-RWIAQALR$/a5IGD$/n3FNAFYARR-NH2 |
| 668 | Pr-WIAQQLR$IGD$FNASYARR-NH2 |
| 669 | Pr-NIAQQLR$IGD$FNASYARR-NH2 |
| 670 | Pr-SIAQQLR$IGD$FNASYARR-NH2 |
| 671 | Pr-WIAQQLR$IGD$FNASYAR-NH2 |
| 672 | Ac-RWIAQNLR$IGD$FNAYYARR-NH2 |
| 673 | Ac-RWIAQRLR$IGD$FNAYYARR-NH2 |
| 674 | Pr-WIAQ$LRR$GDAFNASYARR-NH2 |
| 675 | Ac-RWIAQQLR$IGD$FNAYYAHR-NH2 |
| 676 | Ac-RWIAQQLR$IGD$FNAYYARH-NH2 |
| 677 | Ac-RWIAQQLR$IGD$FNAYYAHH-NH2 |
| 678 | Pr-WIAQQLR$IGD$FNASIARR-NH2 |
| 679 | Ac-IWIAQQLR$IED$FNAYYARR-NH2 |
| 680 | FITC-BaIWIAQELR$IGD$FNAYYARR-NH2 |
| 681 | FITC-BaIWIAQELD$IGD$FNAYYARR-NH2 |
| 682 | FITC-BaRWIAQALR$IGD$FNAFYARR-NH2 |
| 683 | FITC-BaRWIAQALD$IGD$FNAFYARR-NH2 |
| 684 | HBS-IWAarAQELRRIGDEFNAYYARR-NH2 |
| 685 | FITC-BaBaRWIAQALR$IGD$FNAFYARR-NH2 |
| 686 | 5-TAMRA-BaIWIAQELR$IGD$FNAYYARR-NH2 |
| 687 | 5-TAMRA-BaRWIAQALR$IGD$FNAFYARR-NH2 |
| 688 | 5-TAMRA-BaIWIAQELR$IED$FNAYYARR-NH2 |
| 689 | Ac-RWIAQQLR$IGD$FNASYARR-NH2 |
| 690 | Ac-RWIAQQLR$r5IGDStFNA$YARR-NH2 |
| 691 | Ac-RWIAQALR$IGD$FNAC13FYARR-NH2 |
| 692 | Ac-WIAQQLR$r5IGDStFNA$YARR-NH2 |
| 693 | Ac-RIAQELR$IGD$FNAYYAR-NH2 |
| 694 | Ac-RIAQQLR$IGD$FNAYYAR-NH2 |
| 695 | Ac-RWIA4QAL7R$IGD$FNAFYARR-NH2 |
| 696 | Ac-IWIAQELR#cIGR#cFNAYYARR-NH2 |
| 697 | Ac-IWIAQELR#cIGD#cFNAYYARR-NH2 |
| 698 | Ac-IWIAQELR#5n3IGD#5a5FNAYYARR-NH2 |
| 699 | FITC-AhxIWIAQELR#5n3IGD#5a5FNAYYARR-NH2 |
| 700 | HepIAQ$LR$IGD$FNAFYARR-NH2 |
| 701 | IAQDprLRRIGDEFNAYYARR-NH2 |
| 702 | IAQDprLRRIGDQFNAYYARR-NH2 |
| 703 | WIADprALRRIGDEFNAYYARR-NH2 |
| 704 | WIADprALRRIGDQFNAYYARR-NH2 |
| 705 | HepIAQ$LR$IGD$FNAYYARRTag5-FAM- |
| 706 | Ac-TENleNleLAINleLR$IGD$L-NH2 |
| 707 | 5-TAMRA-BaIWIAQELR$IGD$FNAYYARR-NH2 |
| 708 | Ac-RWIAQALR$IGD$FNAFYARR-NH2 |
| 709 | Ac-IWIAQELR#sIGD#sFNAYYARR-NH2 |
| 710 | Ac-IWIAQELR#sIAibD#sFNAYYARR-NH2 |
| 711 | Ac-IWIAQELR$sIGD$sFNAYYARR-NH2 |
| 712 | HepIAQ$LR$IGD$FNAYYARR-NH2 |
| 713 | Ac-RWIAQALR$IGD$VNAFYARR-NH2 |
| 714 | Pr-WIAQQLR$IGD$VNAFYARR-NH2 |
| 715 | Ac-RWIAQALR$IGD$VNASYARR-NH2 |
| 716 | Ac-RWIAQQLR$IGD$VNAFYARR-NH2 |
| 717 | Ac-RWIAQQLR$IGD$VNASYARR-NH2 |
| 718 | Ac-RWIAQALR$IGD$LNAFYARR-NH2 |
| 719 | Ac-RWIAQQLR$IGD$LNAFYARR-NH2 |
| 720 | Ac-KALETLRRVGDGV$RNH$TA-NH2 |
| 721 | Pr-WIAQQLR$IGD$VNAFYARR-NH2 |
| 722 | Pr-WIAQQLR$IGD$VNASYARR-NH2 |
| 723 | Ac-RWIAQQLR$IGD$VNAFYAHH-NH2 |
| 724 | Pr-WIAQQLR$IGD$VNAFYAR-NH2 |
| 725 | Pr-WIAQQLR$IGD$FNAFYAHH-NH2 |
| 726 | Pr-WIAQQLR$IGD$FNAFYARH-NH2 |
| 727 | Pr-WIAQQLR$IGD$FNAFYAHR-NH2 |
| 728 | Ac-RWIA4QAL7R$IGD$FNAFYARR-NH2 |
| 729 | Pr-WIAQQLR$IGD$LNAYYARR-NH2 |
| 730 | Pr-WIAQQLR$IGD$LNASYARR-NH2 |
| 731 | Pr-WIAQQLR$IGD$LNAYYARH-NH2 |
| 732 | Pr-WIAQQLR$IGD$LNAYYAHR-NH2 |
| 733 | Pr-RIAQQLR$IGD$LNAYYARH-NH2 |
| 734 | Pr-RIAQQLR$IGD$LNAYYAHR-NH2 |
| 735 | Pr-RIAQQLR$IGD$LNAYYAHH-NH2 |
| 736 | Pr-SIAQQLR$IGD$LNAYYARR-NH2 |
| 737 | Pr-AibIAQQLR$IGD$LNAYYARR-NH2 |
| 738 | Pr-YIAQQLR$IGD$LNAYYARR-NH2 |
| 739 | Pr-RIAQQLR$IGD$LNAYYAR-NH2 |
| 740 | Ac-RSIAQQLR$IGD$LNAYYARR-NH2 |
| 741 | Ac-IWIAQELR$r5IGDStFNA$YARR-NH2 |
| 742 | Pr-SIAQQLR$r5IGDStFNA$YARR-NH2 |
| 743 | Ac-RWIA$r5ALRStDIL$FNAFYARR-NH2 |
| 744 | Ac-RWIAQALR$5a5DIL$5n3FNAFYARR-NH2 |
| 745 | Ac-RWIAQQLR$IGD$FNAYYAH-NH2 |
| 746 | Ac-RWIA$r5ALRStIDL$FNAFYARR-NH2 |
| 747 | Ac-RWIAQALR$5a5ILL$5n3FNAFYARR-NH2 |
| 748 | Pr-RIAQQLR$IGD$FNAYYAHH-NH2 |
| 749 | Pr-WIAQQLR$IGD$VNAYYAHR-NH2 |
| 750 | Pr-WIAQQLR$IGD$VNAFYAHR-NH2 |
| 751 | Pr-RIAQQLR$IGD$VNAYYAHR-NH2 |
| 752 | Ac-RWIAQALR$5n3DIL$5a5FNAFYARR-NH2 |
| 753 | Ac-R$r8IAQALRStIGDLFN$s8FYARR-NH2 |
| 754 | Pr-RIAQQLR$IGD$FNAYYAH-NH2 |
| 755 | Ac-RWIAQALR$5n3ILL$5a5FNAFYARR-NH2 |
| 756 | Ac-RAIAQQLR$IGD$FNAYYAH-NH2 |
| 757 | Pr-WIAQQLR$IGD$LNAYYAHH-NH2 |
| 758 | Pr-SIAQQLR$IGD$LNAYYAHR-NH2 |
| 759 | Ac-RWIAQQLR$IGD$VNAFYAHR-NH2 |
| 760 | Ac-IWIA$QLRStIGD$r5FNAYYARR-NH2 |
| 761 | Ac-RWIA$QLRStIGD$r5FNAYYARR-NH2 |
| 762 | Ac-RWIAQQLR$IGD$FNAibFYAHH-NH2 |
| 763 | Ac-RWIAQALR$IGD$LNAibFYAHH-NH2 |
| 764 | Ac-IWIA$ALRStIGD$r5LNAYYARR-NH2 |
| 765 | Ac-IWIAQALR$IGDStFNA$r5YAHH-NH2 |
| 766 | Ac-RWIA$ALRStIGD$r5FNAYYARR-NH2 |
| 767 | Pr-WIAQQLR$IGD$FNAYYAHH-NH2 |
| 768 | Pr-SIAQQLR$IGD$FNAFYARR-NH2 |
| 769 | Ac-WIAQQLR$IGD$FNAibFYAHH-NH2 |
| 770 | Ac-RWIAQALR$IGD$VNAibFYAHH-NH2 |
| 771 | Ac-IWIAQQLR$IGD$FNAibFYAHH-NH2 |
| 772 | Ac-IWIAQALR$IGD$VNAibFYAHH-NH2 |
| 773 | Ac-IWIAQALR$IGD$LNAibFYAHH-NH2 |
| 774 | Ac-ELR$r5IGDStFNA$YARR-NH2 |
| 775 | Ac-QELR$r5IGDStFNA$YARR-NH2 |
| 776 | Ac-AQELR$r5IGDStFNA$YARR-NH2 |
| 777 | Ac-IAQELR$r5IGDStFNA$YARR-NH2 |
| 778 | Ac-RWIAQALR$r5IGDStFNA$YAHH-NH2 |
| 779 | Ac-RWIAQQLR$r5IGDStFNA$YAHH-NH2 |
| 780 | Ac-RWIAQALR$IGDStFNA$r5YAHH-NH2 |
| 781 | Ac-RWIAQQLR$IGDStFNA$r5YAHH-NH2 |
| 782 | Ac-IWIAQQFR$IGD$FNAYYARR-NH2 |
| 783 | Ac-RWIAQQFR$IGD$FNAFYAHH-NH2 |
| 784 | Ac-IWIAQALR$IGD$FNAibFYAHH-NH2 |
| 785 | Ac-RWIAQQLR$IGD$FNAibYYAHH-NH2 |
| 786 | Ac-IWIAQALR$IGD$FNAibYYAHH-NH2 |
| 787 | Ac-RWIAQALR$IGD$FNAibYYAHH-NH2 |
| 788 | Ac-RWIAQALR$IGD$LNAibYYAHH-NH2 |
| 789 | Ac-RIAQQLR$IGD$FNAibFYAHH-NH2 |
| 790 | Pr-WIAQQLR$IGD$FNAibYYAHH-NH2 |
| 791 | Pr-RIAQQLR$IGD$FNAibYYAHH-NH2 |
| 792 | Pr-NIAQQLR$IGD$FNAibFYAHH-NH2 |
| 793 | Pr-SIAQQLR$IGD$FNAibFYAHH-NH2 |
| 794 | Pr-NIAQQLR$IGD$FNAibYYARR-NH2 |
| 795 | Pr-SIAQQLR$IGD$FNAibYYARR-NH2 |
| 796 | Ac-IWIA$r5QLRStIGD$FNAYYARR-NH2 |
| 797 | Ac-IWIA$ALDStIGD$r5FNAYYARR-NH2 |
| 798 | Ac-RWIAQALD$IGD$FNAibFYAHH-NH2 |
| 799 | Ac-RWIAQQLR$IGD$LNAibFYAHH-NH2 |
| 800 | Ac-IWIAQQLR$IGD$LNAibFYAHH-NH2 |
| 801 | Ac-RAIAQQLR$IGD$LNAibFYAHH-NH2 |
| 802 | Ac-IRIAQQLR$IGD$LNAibFYAHH-NH2 |
| 803 | Ac-RAIAQQLR$IGD$FNAibFYAHH-NH2 |
| 804 | Ac-IRIAQQLR$IGD$FNAibFYAHH-NH2 |
| 805 | Ac-RWIAQALR$IGA$FNAibFYAHH-NH2 |
| 806 | Ac-RWIAQQLR$IGA$FNAFYAHH-NH2 |
| 807 | Pr-RIAQQLR$IGD$FNAibFYAHH-NH2 |
| 808 | Pr-WIAQQLR$IGD$FNAibFYAHH-NH2 |
| 809 | Ac-RWIAQALR$IGD$INAibFYAHH-NH2 |
| 810 | Ac-RWIAQALR$IGD$ChgNAibFYAHH-NH2 |
| 811 | Ac-IWIAQQLR$IGD$VNAibFYAHH-NH2 |
| 812 | Ac-IWIAQQLR$IGD$INAibFYAHH-NH2 |
| 813 | Ac-RWIAQQLR$IGD$VNAibFYAHH-NH2 |
| 814 | Ac-RWIAQQLR$IGD$INAibFYAHH-NH2 |
| 815 | Pr-WIAQQLR$IGD$VNAibFYAHH-NH2 |
| 816 | Ac-RWIAQAFR$IGD$VNAibFYAHH-NH2 |
| 817 | Ac-RWIAQANleR$IGD$VNAibFYAHH-NH2 |
| 818 | Ac-RWIAQAChgR$IGD$VNAibFYAHH-NH2 |
| 819 | Ac-RWIAQALR$IGD$LNAFYAibHH-NH2 |
| 820 | Ac-RWIAQALR$IGD$VNAFYAibHH-NH2 |
| 821 | Ac-RWIAQALD$IGD$FNAibYYAHH-NH2 |
| 822 | Ac-RWIA$r5ALRStIGD$FNAYYARR-NH2 |
| 823 | Ac-IWIA$r5ALDStIGD$FNAYYARR-NH2 |
| 824 | Ac-IWIA$r5ALRStIGD$FNAYYAibRR-NH2 |
| 825 | Ac-IWIA$r5ALRStIGD$VNAYYARR-NH2 |
| 826 | Ac-IRIAQALR$IGD$FNAibFYAHH-NH2 |
| 827 | Ac-INIAQALR$IGD$FNAibFYAHH-NH2 |
| 828 | Ac-IFIAQALR$IGD$FNAibFYAHH-NH2 |
| 829 | Ac-ISIAQALR$IGD$FNAibFYAHH-NH2 |
| 830 | Ac-IAibIAQALR$IGD$FNAibFYAHH-NH2 |
| 831 | Ac-IWNleAQALR$IGD$FNAibFYAHH-NH2 |
| 832 | Ac-IWIAQANleR$IGD$FNAibFYAHH-NH2 |
| 833 | Ac-IWIAibQALR$IGD$FNAibFYAHH-NH2 |
| 834 | Pr-IAQALR$IGD$FNAibFYAHH-NH2 |
| 835 | Ac-IWIAQAibLR$IGD$FNAibFYAHH-NH2 |
| 836 | Ac-IWIAQLLR$IGD$FNAibFYAHH-NH2 |
| 837 | Ac-IWIAQFLR$IGD$FNAibFYAHH-NH2 |
| 838 | Ac-IAIAAFLR$IGD$FNAibFYA-NH2 |
| 839 | Ac-IWIAQALR$IGD$FNAibYYAibHH-NH2 |
| 840 | Ac-IWIAQALR$IGD$FAAibFYAHH-NH2 |
| 841 | Ac-RWIAQALR$r8IGDAibFN$FYAHH-NH2 |
| 842 | Ac-RWIAQALR$r8IGDAFN$FYAHH-NH2 |
| 843 | Ac-RWIA$r8ALRAibIG$AFNAibYYAHH-NH2 |
| 844 | Ac-RWIA$r8ALRAIG$AFNAibYYAHH-NH2 |
| 845 | Ac-IWIAQALR$IGD$ChaNAibFYAHH-NH2 |
| 846 | 5-FAM-BaIWIAQALR$IGD$FNAibFYAHH-NH2 |
| 847 | 5-FAM-BaRWIAQALR$IGD$LNAibFYAHH-NH2 |
| 848 | Ac-IWILQALR$IAibD$FNAibFYAHH-NH2 |
| 849 | Ac-IAIAQFLR$IGD$FNAibFYAHH-NH2 |
| 850 | Ac-IWIAQALR$r8IGDAFN$FYAHH-NH2 |
| 851 | Ac-IWIAQALR$r8IGDAibFN$FYAHH-NH2 |
| 852 | Ac-IWIAQNLR$IGD$FNAibFYAHH-NH2 |
| 853 | Ac-IWIAQHLR$IGD$FNAibFYAHH-NH2 |
| 854 | Ac-RWIAAQLR$IGD$FNAibFYA-NH2 |
| 855 | Ac-RNIAQALR$IGD$FNAibFYAHH-NH2 |
| 856 | Ac-RFIAQALR$IGD$FNAibFYAHH-NH2 |
| 857 | Ac-RAibIAQALR$IGD$FNAibFYAHH-NH2 |
| 858 | Ac-RAIAQFLR$IGD$FNAibFYAHH-NH2 |
| 859 | Ac-RWIAQLLR$IGD$FNAibFYAHH-NH2 |
| 860 | Ac-RWIAQFLR$IGD$FNAibFYAHH-NH2 |
| 861 | Ac-RWIAQAibLR$IGD$FNAibFYAHH-NH2 |
| 862 | Ac-RWIAQALR$IGD$FNAibFYQHH-NH2 |
| 863 | Ac-RWIAQHLR$IGD$FNAibFYAHH-NH2 |
| 864 | Ac-RWIAQALR$NleGD$FNAibFYAHH-NH2 |
| 865 | Pr-IAQLLR$IGD$FNAibFYAHH-NH2 |
| 866 | Ac-RWIALALR$IGD$FNAibFYAHH-NH2 |
| 867 | Pr-WIALALR$IGD$FNAibFYAHH-NH2 |
| 868 | Ac-RAIAFALR$IGD$FNAibFYAHH-NH2 |
| 869 | Ac-WIAQALR$IGD$FNAibFYQHH-NH2 |
| 870 | Ac-CCPGCCBaIWIAQALR$IGD$FNAibFYAHH-NH2 |
| 871 | Ac-CCPGCCBaRWIAQALR$IGD$VNAibFYAHH-NH2 |
| 872 | Ac-CCPGCCBaRWIAQALR$IGD$LNAibFYAHH-NH2 |
| 873 | Ac-IWIAQALR$IGD$FNAibFYQHH-NH2 |
| 874 | Ac-RWIAQAibLR$r5IGDStFNA$YAHH-NH2 |
| 875 | Ac-IWIAQLLR$IGD$FNAibFYQHH-NH2 |
| 876 | Ac-RWIAQALR$IGD$FNRFYAHH-NH2 |
| 877 | Ac-RWIAQALR$IGD$FNAFYRHH-NH2 |
| 878 | Ac-RWIAQRLR$IGD$FNAFYAHH-NH2 |
| 879 | Ac-RWIAQALR$IGD$FNARYAHH-NH2 |
| 880 | Ac-RWIAERLR$IGD$FNAFYAHH-NH2 |
| 881 | Ac-RWIAQALR$IGD$FNQFYAHH-NH2 |
| 882 | Ac-RWIAQALR$IGD$FNAFYQHH-NH2 |
| 883 | Ac-RWIAQELR$IGD$FNARYAHH-NH2 |
| 884 | Ac-RWIAQALR$IGD$FNAQYAHH-NH2 |
| 885 | Ac-RWIAQQLR$IGD$QNQQYQHH-NH2 |
| 886 | Ac-IWIAAFLR$IGD$FNAibFYAHH-NH2 |
| 887 | Ac-IWIAQALR$IGD$FNleAibFYAHH-NH2 |
| 888 | Ac-IWIAQALR$IGD$FNleAibFYQHH-NH2 |
| 889 | Ac-IWIAQAibLR$IGD$VNAibFYAHH-NH2 |
| 890 | Ac-IWIAQLLR$IGD$VNAibFYAHH-NH2 |
| 891 | Ac-IWIAQAAR$IGD$VNAibFYAHH-NH2 |
| 892 | Ac-IAIAFALR$IGD$VNAibFYAHH-NH2 |
| 893 | Ac-IWIALALR$IGD$VNAibFYAHH-NH2 |
| 894 | Ac-IWIAQALR$IGD$VNAibFYQHH-NH2 |
| 895 | Ac-IWIAQELR$4n4IGD$4a3FNAYYARR-NH2 |
| 896 | Ac-IWIAQELR$4a3IGD$4n4FNAYYARR-NH2 |
| 897 | Ac-IWIAQELR$4n3IGD$4a5FNAYYARR-NH2 |
| 898 | Ac-IWIAQELR$4a5IGD$4n3FNAYYARR-NH2 |
| 899 | Ac-IWIAQELR$4n5IGD$4a5FNAYYARR-NH2 |
| 900 | Ac-IWIAQELR$4a5IGD$4n5FNAYYARR-NH2 |
| 901 | Ac-RCouIAQALR$IGD$LNAibFYAHH-NH2 |
| 902 | Ac-RCouIAQALR$r5IGDStFNA$YAHH-NH2 |
| 903 | Ac-ICouIAQALRRIGDELNAibFYAHH-NH2 |
| 904 | Ac-RCouIAQALRRIGDEFNAFYAHH-NH2 |
| 905 | Ac-IWIAQALR$IGD$FNAFYAibHH-NH2 |
| 906 | Ac-IWIALALR$IGD$FNAibFYAHH-NH2 |
| 907 | Ac-IAIAFALR$IGD$FNAibFYAHH-NH2 |
| 908 | Ac-RWIAQHLR$IGD$VNAibFYAHH-NH2 |
| 909 | Ac-IWIAQHLR$IGD$VNAibFYAHH-NH2 |
| 910 | Ac-RWIAQLLR$IGD$VNAibFYAHH-NH2 |
| 911 | Ac-IWIAQLLR$IGD$VNAibFYAHH-NH2 |
| 912 | Ac-IWIAQFLR$IGD$VNAibFYAHH-NH2 |
| 913 | Ac-IWIAQALR$IGD$HNAibFYAHH-NH2 |
| 914 | Ac-IWIAHLLR$IGD$VNAibFYAHH-NH2 |
| 915 | Ac-IWIAQALR$IGD$INAibFYAHH-NH2 |
| 916 | Ac-IWIAQLLR$IGD$INAibFYAHH-NH2 |
| 917 | Ac-IHIAQLLR$IGD$FNAibFYAHH-NH2 |
| 918 | Ac-IHIAQLLR$IGD$VNAibFYAHH-NH2 |
| 919 | Ac-IWIAQLLR$IGD$VNAibFYAHA-NH2 |
| 920 | Ac-IWIAQLLR$IGD$VNAibFYAAH-NH2 |
| 921 | Ac-RWIAQALD$IGR$VNAibFYAHH-NH2 |
| 922 | Ac-RWIAQALD$IGD$VNAibFYAHH-NH2 |
| 923 | Ac-IWIAQALD$IGR$VNAibFYAHH-NH2 |
| 924 | Ac-RWIAQAAR$IAibD$VNAibFYAHH-NH2 |
| 925 | Ac-IWIAQALD$IGR$FNAibFYAHH-NH2 |
| 926 | Ac-IWIAQALD$IGD$FNAibFYAHH-NH2 |
| 927 | Ac-IWIAQAAR$IAibD$FNAibFYAHH-NH2 |
| 928 | Ac-RWIAQALD$r5IGRStFNA$YAHH-NH2 |
| 929 | Ac-IWIAQALR$r5IGDStFNA$YAHH-NH2 |
| 930 | Ac-RWIAAQLR$IGD$VNAibFYAHH-NH2 |
| 931 | Ac-IWIAAQLR$IGD$FNAibFYAHH-NH2 |
| 932 | Ac-IWNleAQLLR$IGD$FNAibFYAHH-NH2 |
| 933 | Ac-RWNleAQLLR$IGD$VNAibFYAHH-NH2 |
| 934 | Ac-IWNleAibQLLR$IGD$FNAibFYAHH-NH2 |
| 935 | Ac-RWNleAibQLLR$IGD$VNAibFYAHH-NH2 |
| 936 | Ac-IRIAQLLR$IGD$FNAibFYAHH-NH2 |
| 937 | Ac-ISIAQLLR$IGD$FNAibFYAHH-NH2 |
| 938 | Ac-IRIAibQLLR$IGD$FNAibFYAHH-NH2 |
| 939 | Ac-ISIAibQLLR$IGD$FNAibFYAHH-NH2 |
| 940 | Ac-IWIA$r5ALDStIGR$FNAYYARR-NH2 |
| 941 | Pr-WIAibQLLR$IGD$FNAibFYAibHH-NH2 |
| 942 | Ac-IWIAibQLLR$IGD$VNAibFYAibHH-NH2 |
| 943 | Pr-WIAQLLR$IGD$VNAibFYAibHH-NH2 |
| 944 | Pr-WIAibQALR$IGD$FNAibFYAibHH-NH2 |
| 945 | Ac-IWIAibQALR$IGD$VNAibFYAibHH-NH2 |
| 946 | Ac-RWIAibQALR$IGD$VNAibFYAibHH-NH2 |
| 947 | Ac-IWIAQAibLR$IGD$FNAibFYAibHH-NH2 |
| 948 | Ac-IWIAQAibLR$IGD$VNAibFYAibHH-NH2 |
| 949 | Ac-RWIAQAibLR$IGD$VNAibFYAibHH-NH2 |
| 950 | Ac-IWIAQALR$IGD$VNAibFYAibHH-NH2 |
| 951 | FITC-BaIWIAQELR$IGD$F |
| 952 | Ac-I$IAQ$LRRIGDEF$AYY$R-NH2 |
| 953 | Ac-I$IAQ$LRNleIGDNleF$AYY$R-NH2 |
| 954 | Ac-I$IAQ$LRRIGDEF$AYY$HH-NH2 |
| 955 | Ac-I$IAQ$LRNleIGDNleF$AYY$HH-NH2 |
| 956 | Ac-IWIA$ALR$IGD$FNA$YARR-NH2 |
| 957 | Ac-IWIA$ALR$IGD$FNA$YAHH-NH2 |
| 958 | Ac-IWIA$ALR$IGD$FNA$YAR-NH2 |
| 959 | Ac-IWIAQ$LRA$GDAFNAYYAR-NH2 |
| 960 | Ac-IWIAQ$LRA$GDAFNAYYAHH-NH2 |
| 961 | Ac-IWIAQALR$r8IGDAFN$YYARR-NH2 |
| 962 | Ac-IWIAQALR$r8IGDNleFN$YYARR-NH2 |
| 963 | Ac-IWIAQALR$r8IGDAibFN$YYARR-NH2 |
| 964 | Ac-IWIAQALR$r8IGDAFN$YYAHH-NH2 |
| 965 | Ac-IWIAQALR$r8IGDNleFN$YYAHH-NH2 |
| 966 | Ac-IWIAQALR$r8IGDAibFN$YYAHH-NH2 |
| 967 | Ac-IWIAQALR$r8IGDAFN$YYAR-NH2 |
| 968 | Ac-ICouIAQQLR$IGD$FNAibFYAHH-NH2 |
| 969 | Ac-ICouIAQALR$IGD$FNAibFYAHH-NH2 |
| 970 | Ac-ICouIAQELR$IGD$FNAibFYAHH-NH2 |
| 971 | Ac-ICouIAQALD$IGR$FNAibFYAHH-NH2 |
| 972 | Ac-ICouIAQALR$IGD$FNAibFYAAA-NH2 |
| 973 | Ac-ICouIAQALR$IGD$FNAibFYA-NH2 |
| 974 | Ac-RCou2IAQALR$r5IGDStFNA$YAHH-NH2 |
| 975 | Ac-RCou2IAQQLR$r5IGDStFNA$YAHH-NH2 |
| 976 | Ac-RCou2IAQALR$IGD$LNAibFYAHH-NH2 |
| 977 | Ac-ICou2IAQALR$IGD$FNAibFYAHH-NH2 |
| 978 | Ac-ICou2IAQQLR$IGD$FNAibFYAHH-NH2 |
| 979 | Ac-RWIAQALR$5rn3IGDSta5FNA$5n3YAHH-NH2 |
| 980 | Ac-RCou3IAQALR$r5IGDStFNA$YAHH-NH2 |
| 981 | Ac-RCou3IAQQLR$r5IGDStFNA$YAHH-NH2 |
| 982 | Ac-RCou3IAQALR$IGD$LNAibFYAHH-NH2 |
| 983 | Ac-ICou3IAQALR$IGD$FNAibFYAHH-NH2 |
| 984 | Ac-ICou3IAQQLR$IGD$FNAibFYAHH-NH2 |
| 985 | Ac-IWIAQALR$IGD$FNAibFYAAA-NH2 |
| 986 | Ac-IWIAQELR$IGD$FNAibFYAHH-NH2 |
| 987 | Ac-IWIAQALR$r8IGAAibFN$FYAHH-NH2 |
| 988 | Ac-IWIAQALR$IGD$FNAibFYA-NH2 |
| 989 | Ac-ICou2IA$ALRStIGD$r5FNAYYARR-NH2 |
| 990 | Ac-IDprIA$ALRStIGD$r5FNAYYARR-NH2 |
| 991 | Ac-ICou2IA$QLRStIGD$r5FNAYYARR-NH2 |
| 992 | Ac-IDprIA$QLRStIGD$r5FNAYYARR-NH2 |
| 993 | Ac-IWIAQQLR$r5IGDStFNA$YAHH-NH2 |
| 994 | Ac-ICou2IAQQLR$r5IGDStFNA$YAHH-NH2 |
| 995 | Ac-IDprIAQQLR$r5IGDStFNA$YAHH-NH2 |
| 996 | Ac-RDprIAQQLR$r5IGDStFNA$YAHH-NH2 |
| 997 | Ac-IWIAQALR$IGD$FNAibCou2YAHH-NH2 |
| 998 | Ac-IWIAQALR$IGD$FNAibCou3YAHH-NH2 |
| 999 | Ac-IWIAQALR$IGD$FNAibDprYAHH-NH2 |
| 1000 | Ac-IRIAQALR$IGD$FNAibCou2YAHH-NH2 |
| 1001 | Ac-IRIAQALR$IGD$FNAibCou3YAHH-NH2 |
| 1002 | Ac-IRIAQALR$IGD$FNAibDprYAHH-NH2 |
| 1003 | Ac-IAibIAQALR$IGD$FNAibCou2YAHH-NH2 |
| 1004 | Ac-IAibIAQALR$IGD$FNAibCou3YAHH-NH2 |
| 1005 | Ac-IAibIAQALR$IGD$FNAibDprYAHH-NH2 |
| 1006 | Ac-ICou2IAQALR$IGD$FAAibFYAHH-NH2 |
| 1007 | Ac-ICou3IAQALR$IGD$FAAibFYAHH-NH2 |
| 1008 | Ac-IDprIAQALR$IGD$FAAibFYAHH-NH2 |
| 1009 | Pam-IWIAQALR$IGD$FNAibFYAHH-NH2 |
| 1010 | Pam-ICou2IAQALR$IGD$FNAibFYAHH-NH2 |
| 1011 | Pam-ICou3IAQALR$IGD$FNAibFYAHH-NH2 |
| 1012 | Pam-IDprIAQALR$IGD$FNAibFYAHH-NH2 |
| 1013 | Ac-IWIAQALR$5n3IGD$5a5FNAibFYAHH-NH2 |
| 1014 | Ac-IWIAQALR$5a5IGD$5n3FNAibFYAHH-NH2 |
| 1015 | Ac-IWIAQALR$r8IGDAFN$YYARR-NH2 |
| 1016 | Ac-ICou2IAQELR$IGD$FNAibFYAHH-NH2 |
| 1017 | Ac-ICou2IAQALD$IGR$FNAibFYAHH-NH2 |
| 1018 | Ac-ICou2IAQALR$IGD$FNAibFYAAA-NH2 |
| 1019 | Ac-ICou2IAQALR$IGD$FNAibFYA-NH2 |
| 1020 | Ac-RCou2IAQQLR$IGD$FNAibFYAHH-NH2 |
| 1021 | Ac-RCou2IAQALR$IGD$FNAibFYAHH-NH2 |
| 1022 | Ac-RCou2IAQELR$IGD$FNAibFYAHH-NH2 |
| 1023 | Ac-RCou2IAQALD$IGR$FNAibFYAHH-NH2 |
| 1024 | Ac-RCou2IAQALR$IGD$FNAibFYAAA-NH2 |
| 1025 | Ac-RCou2IAQALR$IGD$FNAibFYA-NH2 |
| 1026 | Ac-IWIAQALR$r8IGAAibFN$FYAHH-NH2 |
| 1027 | Ac-IWIA$ALRStIGD$r5FNAYYARR-NH2 |
| 1028 | Pr-Cou2IAQALR$IGD$FNAibFYAHH-NH2 |
| 1029 | Pr-Cou2IAQALR$IGD$FNAibFYQHH-NH2 |
| 1030 | Ac-RWIAQELR$IGD$FNAibFYAHH-NH2 |
| 1031 | Ac-RWIAQALD$IGR$FNAibFYAHH-NH2 |
| 1032 | Ac-RWIAQALR$IGD$FNAibFYAAA-NH2 |
| 1033 | Ac-RWIAQALR$IGD$FNAibFYA-NH2 |
| 1034 | Ac-ICou2IAQALRRIGDEFNAYYAHH-NH2 |
| 1035 | Ac-ICou2IAQELR$IGD$FNAibFYAHH-NH2 |
| 1036 | Ac-ICou2IAQALD$IGR$FNAibFYAHH-NH2 |
| 1037 | Ac-ICou4IAQALR$r5IGDStFNA$YAHH-NH2 |
| 1038 | Ac-RCou4IAQALR$r5IGDStFNA$YAHH-NH2 |
| 1039 | Ac-ICou4IAQALR$IGD$FNAibFYAHH-NH2 |
| 1040 | Ac-ICou4IAQQLR$IGD$FNAibFYAHH-NH2 |
| 1041 | Ac-RCou4IAQALR$IGD$LNAibFYAHH-NH2 |
| 1042 | Ac-IWIAQALR$5a5IGD$5n3FNAibFYAHH-NH2 |
| 1043 | Ac-RWIAQALR$/rn3IGDSta/FNA$/n3YAHH-NH2 |
| 1044 | Ac-ICou2IA$r5ALRStIGD$FNAYYARR-NH2 |
| 1045 | Ac-ICou2IA$r5QLRStIGD$FNAYYARR-NH2 |
| 1046 | Ac-ICou4IA$r5ALRStIGD$FNAYYARR-NH2 |
| 1047 | Ac-ICou4IA$r5QLRStIGD$FNAYYARR-NH2 |
| 1048 | Ac-RCou2IAQALR$IGDStFNA$r5YAHH-NH2 |
| 1049 | Ac-RCou4IAQALR$IGDStFNA$r5YAHH-NH2 |
| 1050 | Ac-ICou7IAQQLR$r5IGDStFNA$YAHH-NH2 |
| 1051 | Ac-RCou7IAQQLR$r5IGDStFNA$YAHH-NH2 |
| 1052 | Ac-IWIAQALR$IGD$FNAibCou7YAHH-NH2 |
| 1053 | Ac-IRIAQALR$IGD$FNAibCou7YAHH-NH2 |
| 1054 | Ac-ICou2IAQQLR$r5IGDStFNA$YAHH-NH2 |
| 1055 | Ac-AAIAQALR$IGD$FNAibFYAHH-NH2 |
| 1056 | Ac-AAIAQALR$IGD$FNAibFYA-NH2 |
| 1057 | Ac-IWIAQALR$IGD$FNAibFYAAAAa-NH2 |
| 1058 | Ac-IWIAQALR$IGD$FNAibAAAAAa-NH2 |
| 1059 | Ac-IWIAQALR$IGD$FNAibFYAHHAAAAa-NH2 |
| 1060 | Ac-IWIAQALA$IGD$FNAibFYAHH-NH2 |
| 1061 | Ac-IWIAQALR$IGD$FAAibFYA-NH2 |
| 1062 | Ac-IWIALALR$IGD$FAAibFYA-NH2 |
| 1063 | Ac-IWIALALR$IGD$FNAibFYA-NH2 |
| 1064 | Ac-IWIALALR$IGD$FAAibFYAHH-NH2 |
| 1065 | Ac-IWIALALR$IGD$FAAAAA-NH2 |
| 1066 | Ac-IWIALALR$IGD$FNAAAA-NH2 |
| 1067 | Ac-IWIALLLR$IGD$FAAibFYAHH-NH2 |
| 1068 | Ac-IWIALLLR$IGD$FNAibFYAHH-NH2 |
| 1069 | Ac-IWIALLLR$IGD$FNAibFYA-NH2 |
| 1070 | Ac-IWIALLLR$IGD$FNAibFYAAAAAa-NH2 |
| 1071 | Ac-RWIALQLR$r5IGDStFNA$YAHH-NH2 |
| 1072 | Ac-RWIAQQLR$r5IGDStFNA$YA-NH2 |
| 1073 | Ac-RWIAQQLR$r5IGDStFNA$YAAa-NH2 |
| 1074 | Ac-RWIALQLR$r5IGDStFNA$YAAa-NH2 |
| 1075 | Ac-RCou2IALQLR$r5IGDStFNA$YAHH-NH2 |
| 1076 | Ac-RCou2IAQQLR$r5IGDStFNA$YA-NH2 |
| 1077 | Ac-RCou2IAQQLR$r5IGDStFNA$YAAa-NH2 |
| 1078 | Ac-RCou2IALQLR$r5IGDStFNA$YAAa-NH2 |
| 1079 | Ac-RCou2IAQALR$5rn3IGDSta5FNA$5n3YAHH-NH2 |
| 1080 | RCou4IAQALR$5rn3IGDSta5FNA$5n3YAHH-NH2 |
| 1081 | 5-FAM-BaRWIAQALR$r5IGDStFNA$YAHH-NH2 |
| 1082 | Ac-RCou2IAQQLRAibIGDAibFNAAibYAHH-NH2 |
| 1083 | Ac-RWIAQQLRAibIGDAibFNAAibYAHH-NH2 |
| 1084 | Ac-RCou2IAQELR$r5IGDStFNA$YAHH-NH2 |
| 1085 | Ac-RWIAQELR$r5IGDStFNA$YAHH-NH2 |
| 1086 | Ac-ICou2IAQELR$IGD$FNAYYARR-NH2 |
| 1087 | Ac-IWIAQALR4Me$5a5IGD$5n3FNAibFYAHH-NH2 |
| 1088 | Ac-IWIAQALR4Ph$5a5IGD$5n3FNAibFYAHH-NH2 |
| 1089 | Ac-NleWIAQALR$r5IGDStFNA$YAHH-NH2 |
| 1090 | Ac-KWIAQALR$r5IGDStFNA$YAHH-NH2 |
| 1091 | Ac-RWIAQALR$r5IGDStFNA$YQHH-NH2 |
| 1092 | Ac-IWIAQALR$r5IGDStFNA$YQHH-NH2 |
| 1093 | Ac-NleCou2IAQALR$r5IGDStFNA$YAHH-NH2 |
| 1094 | Ac-KCou2IAQALR$r5IGDStFNA$YAHH-NH2 |
| 1095 | Ac-IWIAQELRRIGDEF$AYY$RR-NH2 |
| 1096 | Ac-IWIAQELRRIGDEFN$YYA$R-NH2 |
| 1097 | Ac-IWIAQEL$r8RIGDEF$AYYARR-NH2 |
| 1098 | Ac-IWIAQELR$r8IGDEFN$YYARR-NH2 |
| 1099 | Ac-IWIAQELRRIGD$r8FNAYYA$R-NH2 |
| 1100 | Ac-I$IAQStLRRIGD$s8FNAYYARR-NH2 |
| 1101 | Ac-I$r8IAQELRStIGD$r5FNAYYARR-NH2 |
| 1102 | Ac-I$r8IAQELRStIGDEFN$s8YYARR-NH2 |
| 1103 | Ac-IWI$QELStRIGDEF$s8AYYARR-NH2 |
| 1104 | Ac-IWIA$ELRStIGD$r5FNAYYARR-NH2 |
| 1105 | Ac-IWIA$r5ELRStIGD$FNAYYARR-NH2 |
| 1106 | Ac-IWIA$ELRStIGDEFN$s8YYARR-NH2 |
| 1107 | Ac-IWIAQ$r8LRRIGDStFNAYYA$s8R-NH2 |
| 1108 | Ac-IWIAQEL$r8RIGDEFStAYY$r5RR-NH2 |
| 1109 | Ac-IWIAQELR$IGDStFNAYYA$s8R-NH2 |
| 1110 | Ac-IWIAQELR$r8IGDEFNStYYA$r5R-NH2 |
| 1111 | Ac-I$IAQ$LRRIGDEF$AYY$RR-NH2 |
| 1112 | Ac-I$IAQ$LRRIGDEFN$YYA$R-NH2 |
| 1113 | Ac-IWI$QEL$RIGDEF$AYY$RR-NH2 |
| 1114 | Ac-IWI$QEL$RIGDEFN$YYA$R-NH2 |
| 1115 | Ac-IWIA$ELR$IGDEF$AYY$RR-NH2 |
| 1116 | Ac-IWIA$ELR$IGDEFN$YYA$R-NH2 |
| 1117 | Ac-I$r8IAQELR$IGDEF$AYY$RR-NH2 |
| 1118 | Ac-I$r8IAQELR$IGDEFN$YYA$R-NH2 |
| 1119 | Ac-IWIAQ$r8LRRIGD$F$AYY$RR-NH2 |
| 1120 | Ac-IWIAQ$r8LRRIGD$FN$YYA$R-NH2 |
| 1121 | Ac-I$IAQ$L$r8RIGDEF$AYYARR-NH2 |
| 1122 | Ac-I$IAQ$LR$r8IGDEFN$YYARR-NH2 |
| 1123 | Ac-I$IAQ$LRRIGD$r8FNAYYA$R-NH2 |
| 1124 | Ac-IWI$QEL$RIGD$r8FNAYYA$R-NH2 |
| 1125 | Ac-IWIA$ELR$IGD$r8FNAYYA$R-NH2 |
| 1126 | 5-FAM-BaIWIAQELRRIGDEFNAYYARR-NH2 |
| 1127 | 5-FAM-BaIWIAQELR$IGD$FNAYYARR-NH2 |
| 1128 | 5-FAM-BaNLWAAQRYGRELR$NleSD$FVDSFKK-NH2 |
| 1129 | 5-FAM-BaKALETLR$VGD$VQRNHETAF-NH2 |
| 1130 | Ac-RCou2IAQALR$IGD$FNAFYARR-NH2 |
| 1131 | Ac-RCou2IAQALR$5rn3IGDSta5FNA$5n3YAHH-NH2 |
| 1132 | Ac-IWI$QEL$RIGDEF$AYY$RR-NH2 |
| 1133 | Ac-IWIAQ$r8LRRIGD$F$AYY$RR-NH2 |
| 1134 | Ac-IWIAQ$r8LRRIGD$FN$YYA$R-NH2 |
| 1135 | Ac-IWI$QEL$RIGD$r8FNAYYA$R-NH2 |
| 1136 | Ac-IWIA$ELR$IGD$r8FNAYYA$R-NH2 |
| 1137 | Ac-IWI$QELStRIGDEF$s8AYYARR-NH2 |
| 1138 | Ac-IWIAQ$r8LRRIGDStFNAYYA$s8R-NH2 |
| 1139 | Ac-IWIAQEL$r8RIGDEFStAYY$r5RR-NH2 |
| 1140 | Ac-I$r8IAQELR$IGDEF$AYY$RR-NH2 |
| 1141 | Ac-IWIAQ$r8LRRIGD$FNAYYARR-NH2 |
| 1142 | Ac-IWIAQELRRIGDEF$AYY$RR-NH2 |
| 1143 | Ac-IWIAQALR$r8IGDAFN$YYA-NH2 |
| 1144 | Ac-WIAQALR$r8IGDAFN$YYA-NH2 |
| 1145 | Ac-IAQALR$r8IGDAFN$YYA-NH2 |
| 1146 | Ac-IAAALR$r8IGDAFN$YYA-NH2 |
| 1147 | Ac-IAQALA$r8IGDAFN$YYA-NH2 |
| 1148 | Ac-IAQALR$r8IADAFN$YYA-NH2 |
| 1149 | Ac-IAQALR$r8IGDAAN$YYA-NH2 |
| 1150 | Ac-IAQALR$r8IGDAFA$YYA-NH2 |
| 1151 | Ac-IAQALR$r8IGDAFN$AYA-NH2 |
| 1152 | Ac-IAQALR$r8IGDAFN$YAA-NH2 |
| 1153 | Ac-IAQALRRIGDEFNAYYAHH-NH2 |
| 1154 | Ac-IAQALR$IGD$FNAYYAHH-NH2 |
| 1155 | Ac-IWIAQALRRIGDEFNAYYAHH-NH2 |
| 1156 | Ac-IWIAQALR$IGD$FNAYYAHH-NH2 |
| 1157 | Ac-I$IAQ$LR$IGD$FNAYYAHH-NH2 |
| 1158 | HepIAQ$LRRIGDEFNAYYAHH-NH2 |
| 1159 | HepIAQ$LR$IGD$FNAYYAHH-NH2 |
| 1160 | HepIA$ALRRIGDEFNAYYAHH-NH2 |
| 1161 | HepIA$ALR$IGD$FNAYYAHH-NH2 |
| 1162 | Ac-I$IAQ$LRRIGDEF$AYY$AA-NH2 |
| 1163 | Ac-I$IAQ$LRRIGDEF$AYY$A-NH2 |
| 1164 | Ac-I$IAA$LRRIGDEF$AYY$A-NH2 |
| 1165 | Ac-I$IAV$LRRIGDEF$AYY$A-NH2 |
| 1166 | Ac-I$IAL$LRRIGDEF$AYY$A-NH2 |
| 1167 | Ac-I$IAI$LRRIGDEF$AYY$A-NH2 |
| 1168 | Ac-I$IAF$LRRIGDEF$AYY$A-NH2 |
| 1169 | Ac-I$IAY$LRRIGDEF$AYY$A-NH2 |
| 1170 | Ac-I$IAG$LRRIGDEF$AYY$A-NH2 |
| 1171 | Ac-I$IAQ$LRAIGDAF$AYY$A-NH2 |
| 1172 | Ac-I$IAQ$LRAIGDAibF$AYY$A-NH2 |
| 1173 | Ac-I$IAQ$LRAibIGDAF$AYY$A-NH2 |
| 1174 | Ac-I$IAQ$LRAibIGDAibF$AYY$A-NH2 |
| 1175 | Ac-I$IAQ$LRNleIGDNleF$AYY$A-NH2 |
| 1176 | Ac-I$IAQ$LRNleIGDAibF$AYY$A-NH2 |
| 1177 | Ac-I$IAQ$LRAibIGDNleF$AYY$A-NH2 |
| 1178 | Ac-I$IAQ$LR$r8IGDEFN$YYA-NH2 |
| 1179 | Ac-I$IAA$LR$r8IGDEFN$YYA-NH2 |
| 1180 | Ac-I$IAV$LR$r8IGDEFN$YYA-NH2 |
| 1181 | Ac-I$IAL$LR$r8IGDEFN$YYA-NH2 |
| 1182 | Ac-I$IAI$LR$r8IGDEFN$YYA-NH2 |
| 1183 | Ac-I$IAF$LR$r8IGDEFN$YYA-NH2 |
| 1184 | Ac-I$IAY$LR$r8IGDEFN$YYA-NH2 |
| 1185 | Ac-I$IAG$LR$r8IGDEFN$YYA-NH2 |
| 1186 | Ac-I$IAQ$LR$r8IGDAFN$YYA-NH2 |
| 1187 | Ac-I$IAQ$LR$r8IGDNleFN$YYA-NH2 |
| 1188 | Ac-I$IAQ$LR$r8IGDAibFN$YYA-NH2 |
| 1189 | Ac-IWIA$ELR$IGD$r8FNAYYA$A-NH2 |
| 1190 | Ac-IWIA$ALR$IGD$r8FNAYYA$A-NH2 |
| 1191 | Ac-IWIA$VLR$IGD$r8FNAYYA$A-NH2 |
| 1192 | Ac-IWIA$LLR$IGD$r8FNAYYA$A-NH2 |
| 1193 | Ac-IWIA$ILR$IGD$r8FNAYYA$A-NH2 |
| 1194 | Ac-IWIA$FLR$IGD$r8FNAYYA$A-NH2 |
| 1195 | Ac-IWIA$YLR$IGD$r8FNAYYA$A-NH2 |
| 1196 | Ac-IWIA$GLR$IGD$r8FNAYYA$A-NH2 |
| 1197 | Ac-IWIA$SLR$IGD$r8FNAYYA$A-NH2 |
| 1198 | Ac-I$IAQ$LRRIGDEF$AYY$-NH2 |
| 1199 | Ac-IWIA$ELR$IGD$r8FNAYYA$-NH2 |
| 1200 | Ac-WIAQALR$r8IGDAFN$YYA-NH2 |
| 1201 | Ac-IAQALR$r8IGDAFN$YYA-NH2 |
| 1202 | Ac-IAAALR$r8IGDAFN$YYA-NH2 |
| 1203 | Ac-IAQALA$r8IGDAFN$YYA-NH2 |
| 1204 | Ac-IAQALR$r8IADAFN$YYA-NH2 |
| 1205 | Ac-IAQALR$r8IGDAAN$YYA-NH2 |
| 1206 | Ac-IAQALR$r8IGDAFA$YYA-NH2 |
| 1207 | Ac-IAQALR$r8IGDAFN$AYA-NH2 |
| 1208 | Ac-IAQALR$r8IGDAFN$YAA-NH2 |
| 1209 | Ac-I$IAL$LR$r8IGDAFN$YYA-NH2 |
| 1210 | Ac-I$IALALR$IGDAFN$YYA$A-NH2 |
| 1211 | Ac-IWIA$ALR$IGDAFN$YYA$A-NH2 |
| 1212 | Ac-IWIA$ALRStIGDAFN$s8YYA-NH2 |
| 1213 | Ac-IWIA$ALRStIGDNleFN$s8YYA-NH2 |
| 1214 | Ac-I$r8IALALRStIGDAFN$s8YYA-NH2 |
| 1215 | Ac-I$r8IALALRStIGD$r5FNAYYA-NH2 |
| 1216 | Ac-IWIALALR$IGD$FNAYYA-NH2 |
| 1217 | Ac-IWIAQALR$IGD$FNAYYA-NH2 |
| 1218 | Ac-I$IAA$LRAibIGDAibF$AYY$A-NH2 |
| 1219 | Ac-I$IAL$LRAibIGDAibF$AYY$A-NH2 |
| 1220 | Ac-I$r8IALALR$IGDAF$AYY$A-NH2 |
| 1221 | Ac-I$r8IAQELRStIGDAFN$s8YYARR-NH2 |
| 1222 | Ac-I$r8IAQALRStIGDAFN$s8YYA-NH2 |
| 1223 | HBS-IAAarALRRIGDEFNAYYAHH-NH2 |
| 1224 | HBS-IAAarALR$IGD$FNAYYAHH-NH2 |
| 1225 | HBS-IWAarAQALRRIGDEFNAYYAHH-NH2 |
| 1226 | HBS-IWAarAQALR$IGD$FNAYYAHH-NH2 |
| 1227 | HepIAQ$LRRIGDEFNAYYAHH-NH2 |
| 1228 | HepIAQ$LR$IGD$FNAYYAHH-NH2 |
| 1229 | HepIA$ALR$IGD$FNAYYAHH-NH2 |
| 1230 | Ac-I$IAQ$LR$r8IGDEFN$YYA-NH2 |
| 1231 | Ac-I$IAA$LR$r8IGDEFN$YYA-NH2 |
| 1232 | Ac-I$IAV$LR$r8IGDEFN$YYA-NH2 |
| 1233 | Ac-I$IAV$LR$r8IGDEFN$YYA-NH2 |
| 1234 | Ac-I$IAI$LR$r8IGDEFN$YYA-NH2 |
| 1235 | Ac-I$IAI$LR$r8IGDEFN$YYA-NH2 |
| 1236 | Ac-I$IAY$LR$r8IGDEFN$YYA-NH2 |
| 1237 | Ac-I$IAL$LR$r8IGDEFN$YYA-NH2 |
| 1238 | Ac-I$IAL$LR$r8IGDEFN$YYA-NH2 |
| 1239 | Ac-I$IAF$LR$r8IGDEFN$YYA-NH2 |
| 1240 | Ac-I$IAF$LR$r8IGDEFN$YYA-NH2 |
| 1241 | Ac-I$IAQ$LR$r8IGDAFN$YYA-NH2 |
| 1242 | Ac-I$IAQ$LR$r8IGDNleFN$YYA-NH2 |
| 1243 | Ac-I$IAQ$LR$r8IGDAibFN$YYA-NH2 |
| 1244 | Ac-I$IAQ$LRRIGDEF$AYY$-NH2 |
| 1245 | Ac-I$IAA$LRRIGDEF$AYY$-NH2 |
| 1246 | Ac-I$IAV$LRRIGDEF$AYY$-NH2 |
| 1247 | Ac-I$IAL$LRRIGDEF$AYY$-NH2 |
| 1248 | Ac-I$IAI$LRRIGDEF$AYY$-NH2 |
| 1249 | Ac-I$IAF$LRRIGDEF$AYY$-NH2 |
| 1250 | Ac-I$IAY$LRRIGDEF$AYY$-NH2 |
| 1251 | Ac-I$IAG$LRRIGDEF$AYY$-NH2 |
| 1252 | Ac-I$IAQ$LRAIGDAF$AYY$-NH2 |
| 1253 | Ac-I$IAQ$LRAIGDAibF$AYY$-NH2 |
| 1254 | Ac-I$IAQ$LRAibIGDAF$AYY$-NH2 |
| 1255 | Ac-I$IAQ$LRAibIGDAibF$AYY$-NH2 |
| 1256 | Ac-I$IAQ$LRNleIGDNleF$AYY$-NH2 |
| 1257 | Ac-I$IAQ$LRNleIGDAibF$AYY$-NH2 |
| 1258 | Ac-I$IAQ$LRAibIGDNleF$AYY$-NH2 |
| 1259 | Ac-IWIA$ALR$IGD$r8FNAYYA$-NH2 |
| 1260 | Ac-IWIA$VLR$IGD$r8FNAYYA$-NH2 |
| 1261 | Ac-IWIA$LLR$IGD$r8FNAYYA$-NH2 |
| 1262 | Ac-IWIA$ILR$IGD$r8FNAYYA$-NH2 |
| 1263 | Ac-IWIA$FLR$IGD$r8FNAYYA$-NH2 |
| 1264 | Ac-IWIA$YLR$IGD$r8FNAYYA$-NH2 |
| 1265 | Ac-IWIA$GLR$IGD$r8FNAYYA$-NH2 |
| 1266 | Ac-IWIA$SLR$IGD$r8FNAYYA$-NH2 |
| 1267 | Ac-I$r8IALALR$IGDAFN$YYA$A-NH2 |
| 1268 | Ac-IWIA$r5ALRStIGDNleFN$r8YYA-NH2 |
| 1269 | Ac-I$IAL$LR$r8IGDAFN$YYA-NH2 |
| 1270 | Ac-ICou2IAQALR$r5IGDStFNA$YAHH-NH2 |
| 1271 | Ac-I$IAQ$LRAIGDAF$AYY$-NH2 |
| 1272 | Ac-I$IAQ$LRAIGDAibF$AYY$-NH2 |
| 1273 | Ac-I$IAQ$LRAIGDAibF$AYY$-NH2 |
| 1274 | Ac-I$IAQ$LRAibIGDAF$AYY$-NH2 |
| 1275 | Ac-I$IAQ$LRAibIGDAF$AYY$-NH2 |
| 1276 | Ac-I$IAQ$LRAibIGDAibF$AYY$-NH2 |
| 1277 | Ac-I$IAQ$LRAibIGDAibF$AYY$-NH2 |
| 1278 | Ac-I$IAQ$LRNleIGDNleF$AYY$-NH2 |
| 1279 | Ac-I$IAQ$LRNleIGDNleF$AYY$-NH2 |
| 1280 | Ac-I$IAQ$LRNleIGDAibF$AYY$-NH2 |
| 1281 | Ac-I$IAQ$LRNleIGDAibF$AYY$-NH2 |
| 1282 | Ac-IWIA$VLR$IGD$r8FNAYYA$-NH2 |
| 1283 | Ac-IWIA$LLR$IGD$r8FNAYYA$-NH2 |
| 1284 | Ac-IWIA$FLR$IGD$r8FNAYYA$-NH2 |
| 1285 | Ac-IWIA$SLR$IGD$r8FNAYYA$-NH2 |
| 1286 | Ac-IWIA$ELR$IGD$r8FNAYYA$-NH2 |
| 1287 | Ac-IWIA$ALR$IGD$r8FNAYYA$-NH2 |
| 1288 | Ac-I$IAA$LRRIGDEF$AYY$-NH2 |
| 1289 | Ac-I$IAA$LRRIGDEF$AYY$-NH2 |
| 1290 | Ac-I$IAL$LRRIGDEF$AYY$RR-NH2 |
| 1291 | Ac-I$IAQ$LRAibIGDAF$AYY$RR-NH2 |
| 1292 | Ac-I$IAL$LRAibIGDAF$AYY$RR-NH2 |
| 1293 | Ac-I$IAL$LRRIGDEF$AYY$R-NH2 |
| 1294 | Ac-I$IAQ$LRAibIGDAF$AYY$R-NH2 |
| 1295 | Ac-I$IAL$LRAibIGDAF$AYY$R-NH2 |
| 1296 | Ac-I$IAY$LR$r8IGDEFN$YYARR-NH2 |
| 1297 | Ac-I$IAL$LR$r8IGDEFN$YYARR-NH2 |
| 1298 | Ac-I$IAF$LR$r8IGDEFN$YYARR-NH2 |
| 1299 | Ac-I$IAQ$LR$r8IGDEFN$YYAR-NH2 |
| 1300 | Ac-I$IAY$LR$r8IGDEFN$YYAR-NH2 |
| 1301 | Ac-I$IAL$LR$r8IGDEFN$YYAR-NH2 |
| 1302 | Ac-I$IAF$LR$r8IGDEFN$YYAR-NH2 |
| 1303 | Ac-IWIA$ALR$IGD$r8FNAYYA$R-NH2 |
| 1304 | Ac-IWIALALR$r8IGDEFN$YYARR-NH2 |
| 1305 | Ac-IWIAYALR$r8IGDEFN$YYARR-NH2 |
| 1306 | Ac-IWIAQALR$r8IGDEFN$YYAR-NH2 |
| 1307 | Ac-IWIALALR$r8IGDEFN$YYAR-NH2 |
| 1308 | Ac-IWIAYALR$r8IGDEFN$YYAR-NH2 |
| 1309 | Ac-IWIALALR$IGD$FNAYYARR-NH2 |
| 1310 | Ac-IWIAYALR$IGD$FNAYYARR-NH2 |
| 1311 | Ac-IWIALALR$IGD$FNAYYAR-NH2 |
| 1312 | Ac-IWIAYALR$IGD$FNAYYAR-NH2 |
| 1313 | Ac-IWIALALR$IGD$FNAYYAH-NH2 |
| 1314 | Ac-IWIAQALR%r8IGDAFN%YYA-NH2 |
| 1315 | Ac-I$IAL$LRRIGDEF$AYY$RR-NH2 |
| 1316 | Ac-I$IAL$LRRIGDEF$AYY$R-NH2 |
| 1317 | Ac-I$IAQ$LRAibIGDAF$AYY$R-NH2 |
| 1318 | Ac-I$IAL$LRAibIGDAF$AYY$R-NH2 |
| 1319 | Ac-I$IAY$LR$r8IGDEFN$YYARR-NH2 |
| 1320 | Ac-I$IAL$LR$r8IGDEFN$YYARR-NH2 |
| 1321 | Ac-IWIA$ALR$IGD$r8FNAYYA$R-NH2 |
| 1322 | Ac-I$IAY$LR$r8IGDEFN$YYAR-NH2 |
| 1323 | Ac-I$IAL$LR$r8IGDEFN$YYAR-NH2 |
| 1324 | Ac-I$IAF$LR$r8IGDEFN$YYAR-NH2 |
| 1325 | Ac-I$IAQ$LR$r8IGDAFN$YYARR-NH2 |
| 1326 | Ac-I$IAY$LR$r8IGDAFN$YYARR-NH2 |
| 1327 | Ac-I$IAL$LR$r8IGDAFN$YYARR-NH2 |
| 1328 | Ac-I$IAF$LR$r8IGDAFN$YYARR-NH2 |
| 1329 | Ac-I$IAQ$LR$r8IGDAFN$YYAR-NH2 |
| 1330 | Ac-I$IAY$LR$r8IGDAFN$YYAR-NH2 |
| 1331 | Ac-I$IAL$LR$r8IGDAFN$YYAR-NH2 |
| 1332 | Ac-I$IAF$LR$r8IGDAFN$YYAR-NH2 |
| 1333 | Ac-IWIAQALR$r8IGDEFN$YYA-NH2 |
| 1334 | Ac-IWIAQALR$r8IGDQFN$YYA-NH2 |
| 1335 | Ac-IWIAAALR$r8IGDEFN$YYA-NH2 |
| 1336 | Ac-IWIAAALR$r8IGDQFN$YYA-NH2 |
| 1337 | Ac-IWIAAALR$r8IGDAFN$YYA-NH2 |
| 1338 | Ac-IWIAQALR$r8IGDEFA$YYA-NH2 |
| 1339 | Ac-IWIAQALR$r8IGDQFA$YYA-NH2 |
| 1340 | Ac-IWIAQALR$r8IGDAFA$YYA-NH2 |
| 1341 | Ac-IWIAQALCit$r8IGDAFN$YYA-NH2 |
| 1342 | Ac-IWIAQALCit$r8IGDQFN$YYA-NH2 |
| 1343 | Ac-IWIAQALH$r8IGDAFN$YYA-NH2 |
| 1344 | Ac-IWIAQALH$r8IGDQFN$YYA-NH2 |
| 1345 | Ac-IWIAQALQ$r8IGDAFN$YYA-NH2 |
| 1346 | Ac-IWIAQALQ$r8IGDQFN$YYA-NH2 |
| 1347 | Ac-IWIAQALR$r8IGDAAN$YYA-NH2 |
| 1348 | Ac-IWIAQALR$r8IGDQAN$YYA-NH2 |
| 1349 | Ac-IWIAQALR$r8IGDAIN$YYA-NH2 |
| 1350 | Ac-IWIAQALR$r8IGDQIN$YYA-NH2 |
| 1351 | Ac-IWIAQAAR$r8IGDAAN$YYA-NH2 |
| 1352 | Ac-IWIAQALR$r8IADAFN$YYA-NH2 |
| 1353 | Ac-IWIAQALR$r8IADQFN$YYA-NH2 |
| 1354 | Ac-IWIAQALR$r8AGDAFN$YYA-NH2 |
| 1355 | Ac-IWIAQALR$r8AGDQFN$YYA-NH2 |
| 1356 | Ac-IWIAQALR$r8FGDAFN$YYA-NH2 |
| 1357 | Ac-IWIAQALR$r8FGDQFN$YYA-NH2 |
| 1358 | Ac-IWFAQALR$r8IGDAFN$YYA-NH2 |
| 1359 | Ac-IWFAQALR$r8IGDQFN$YYA-NH2 |
| 1360 | Ac-IAIAQALR$r8IGDAFN$YYA-NH2 |
| 1361 | Ac-IWIAQALA$r8IGDAFN$YYA-NH2 |
| 1362 | Ac-IWIAQALR$r8IGNAFN$YYA-NH2 |
| 1363 | Ac-IWIAQAAR$r8IGDAFN$YYA-NH2 |
| 1364 | FITC-BaIWIAQALR$r8IGDAFN$YYA-NH2 |
| 1365 | 5-FAM-BaIWIAQALR$r8IGDAFN$YYA-NH2 |
| 1366 | 5-FAM-BaIWIAQALR$r8IGDEFN$YYA-NH2 |
| 1367 | Ac-WLAQLLR$IGD$IN-NH2 |
| 1368 | Ac-ICou2IALALR$IGD$FNAYYA-NH2 |
| 1369 | Ac-ICou2IALALR$IGD$FNAibFYA-NH2 |
| 1370 | Ac-I$IAY$LR$r8IGDAFN$YYARR-NH2 |
| 1371 | Ac-I$IAL$LR$r8IGDAFN$YYARR-NH2 |
| 1372 | Ac-I$IAF$LR$r8IGDAFN$YYARR-NH2 |
| 1373 | Ac-I$IAQ$LR$r8IGDAFN$YYAR-NH2 |
| 1374 | Ac-I$IAY$LR$r8IGDAFN$YYAR-NH2 |
| 1375 | Ac-I$IAL$LR$r8IGDAFN$YYAR-NH2 |
| 1376 | Ac-I$IAF$LR$r8IGDAFN$YYAR-NH2 |
| 1377 | Ac-IAIAQALR$r8IGDAFN$YYA-NH2 |
| 1378 | Ac-IWIAQALR$r8IGDEFN$YYA-NH2 |
| 1379 | Ac-IWIAQALR$r8IGDQFN$YYA-NH2 |
| 1380 | Ac-IWIAAALR$r8IGDEFN$YYA-NH2 |
| 1381 | Ac-IWIAAALR$r8IGDQFN$YYA-NH2 |
| 1382 | Ac-IWIAAALR$r8IGDAFN$YYA-NH2 |
| 1383 | Ac-IWIAQALR$r8IGDAFA$YYA-NH2 |
| 1384 | Ac-IWIAQALCit$r8IGDAFN$YYA-NH2 |
| 1385 | Ac-IWIAQALCit$r8IGDQFN$YYA-NH2 |
| 1386 | Ac-IWIAQALH$r8IGDAFN$YYA-NH2 |
| 1387 | Ac-IWIAQALH$r8IGDQFN$YYA-NH2 |
| 1388 | Ac-IWIAQALQ$r8IGDAFN$YYA-NH2 |
| 1389 | Ac-IWIAQALQ$r8IGDQFN$YYA-NH2 |
| 1390 | Ac-IWIAQALR$r8IGDAAN$YYA-NH2 |
| 1391 | Ac-IWIAQALR$r8IGDAIN$YYA-NH2 |
| 1392 | Ac-IWIAQALR$r8IGDQIN$YYA-NH2 |
| 1393 | Ac-IWIAQAAR$r8IGDAAN$YYA-NH2 |
| 1394 | Ac-IWIAQALR$r8IADAFN$YYA-NH2 |
| 1395 | Ac-IWIAQALR$r8IADQFN$YYA-NH2 |
| 1396 | Ac-IWIAQALR$r8AGDAFN$YYA-NH2 |
| 1397 | Ac-IWIAQALR$r8AGDQFN$YYA-NH2 |
| 1398 | Ac-IWIAQALR$r8FGDAFN$YYA-NH2 |
| 1399 | Ac-IWIAQALR$r8FGDQFN$YYA-NH2 |
| 1400 | Ac-IWFAQALR$r8IGDAFN$YYA-NH2 |
| 1401 | Ac-IWFAQALR$r8IGDQFN$YYA-NH2 |
| 1402 | Ac-IWIAQALA$r8IGDAFN$YYA-NH2 |
| 1403 | Ac-IWIAQALR$r8IGNAFN$YYA-NH2 |
| 1404 | Ac-IWIAQAAR$r8IGDAFN$YYA-NH2 |
| 1405 | Ac-IWIALALG$IGD$VNAYYA-NH2 |
| 1406 | Ac-IWIALALG$IGD$INAYYA-NH2 |
| 1407 | Ac-IWIALALG$IGN$VNAYYA-NH2 |
| 1408 | Ac-IWIALALG$IGN$INAYYA-NH2 |
| 1409 | Ac-IWIALALN$IGD$VNAYYA-NH2 |
| 1410 | Ac-IWIALALN$IGD$INAYYA-NH2 |
| 1411 | Ac-IWIALALN$IGN$VNAYYA-NH2 |
| 1412 | Ac-IWIALALN$IGN$INAYYA-NH2 |
| 1413 | Ac-IWIALALR$IGD$VNAFYA-NH2 |
| 1414 | Ac-IWIALALR$IGD$VNAYYA-NH2 |
| 1415 | Ac-IWIALALR$IGD$VNAibFYA-NH2 |
| 1416 | Ac-IWIALALR$IGD$VNAibYYA-NH2 |
| 1417 | Ac-IWFALALR$IGD$FNAYYA-NH2 |
| 1418 | Ac-IWYALALR$IGD$FNAYYA-NH2 |
| 1419 | Ac-IWVALALR$IGD$FNAYYA-NH2 |
| 1420 | Ac-IWLALALR$IGD$FNAYYA-NH2 |
| 1421 | Ac-IWIAQALR$IGD$VNAYYA-NH2 |
| 1422 | Ac-IWIAQALR$IGD$INAYYA-NH2 |
| 1423 | Ac-IWIALALR$IGD$INAYYA-NH2 |
| 1424 | Ac-IWIALLLR$IGD$VNAYYA-NH2 |
| 1425 | Ac-IWIALLLR$IGD$INAYYA-NH2 |
| 1426 | Ac-IWIALALG$IGD$FNAYYA-NH2 |
| 1427 | Ac-IWIALALS$IGD$FNAYYA-NH2 |
| 1428 | Ac-IWIALALH$IGD$FNAYYA-NH2 |
| 1429 | Ac-IWIALALN$IGD$FNAYYA-NH2 |
| 1430 | Ac-IWIALAIG$IGD$VNAYYA-NH2 |
| 1431 | Ac-IWIALAIG$IGD$INAYYA-NH2 |
| 1432 | Ac-IWIALAIN$IGD$VNAYYA-NH2 |
| 1433 | Ac-IWIALAIN$IGD$INAYYA-NH2 |
| 1434 | Ac-IWIALALN$IGD$VNAYYAHH-NH2 |
| 1435 | Ac-IWIALALN$IGD$INAYYAHH-NH2 |
| 1436 | Ac-IWIALALN$IGN$VNAYYAHH-NH2 |
| 1437 | Ac-IWIALALN$IGN$INAYYAHH-NH2 |
| 1438 | Ac-IWIA$r5ALGStIGD$VNAYYA-NH2 |
| 1439 | Ac-IWIA$r5ALGStIGD$INAYYA-NH2 |
| 1440 | Ac-IWIA$r5ALGStIGN$VNAYYA-NH2 |
| 1441 | Ac-IWIA$r5ALGStIGN$INAYYA-NH2 |
| 1442 | Ac-IWIALALR$IGD$VNAAAA-NH2 |
| 1443 | Ac-IWIALALG$IGD$VNAAAA-NH2 |
| 1444 | Ac-IWIALALD$IGD$VNAAAA-NH2 |
| 1445 | Ac-IWIALALN$IGD$VNAAAA-NH2 |
| 1446 | Ac-IWIALALR$IGD$VN-NH2 |
| 1447 | Ac-IWIALALG$IGD$VN-NH2 |
| 1448 | Ac-IWIALALD$IGD$VN-NH2 |
| 1449 | Ac-IWIALALN$IGD$VN-NH2 |
| 1450 | 5-FAM-BaIWIA$r5ALGStIGD$VNAYYA-NH2 |
| 1451 | 5-FAM-BaIWIALALR$IGD$FNAibFYA-NH2 |
| 1452 | 5-FAM-BaIWIA$r5ALGStIGN$INAYYA-NH2 |
| 1453 | 5-FAM-BaIWIALALG$IGN$INAYYA-NH2 |
| 1454 | FITC-BaIWIA$r5ALGStIGD$VNAYYA-NH2 |
| 1455 | FITC-BaIWIALALR$IGD$FNAibFYA-NH2 |
| 1456 | 5-FAM-BaIWIA$r5ALGStIGD$INAYYA-NH2 |
| 1457 | Ac-IWIAQALR$r8IGDQFA$YYA-NH2 |
| 1458 | Ac-RWIAQALR$IGD$LNAFYAHH-NH2 |
| 1459 | Ac-RWIAQELR$IGD$LNAibFYAHH-NH2 |
| 1460 | Ac-RWIAQALR$IGD$LNAibFYA-NH2 |
| 1461 | Ac-RWIAQAAR$IGD$LNAibFYAHH-NH2 |
| 1462 | Ac-RWIAQALA$IGD$LNAibFYAHH-NH2 |
| 1463 | Ac-RWIAQALR$IGN$LNAibFYAHH-NH2 |
| 1464 | Ac-RWIAQALCit$IGD$LNAibFYAHH-NH2 |
| 1465 | Ac-RWIAQALR$IGD$ANAibFYAHH-NH2 |
| 1466 | Ac-RCou2IAQAAR$IGD$LNAibFYAHH-NH2 |
| 1467 | Ac-RCou2IAQALA$IGD$LNAibFYAHH-NH2 |
| 1468 | Ac-RCou2IAQALR$IGN$LNAibFYAHH-NH2 |
| 1469 | Ac-RCou2IAQALCit$IGD$LNAibFYAHH-NH2 |
| 1470 | Ac-IWIAMOALCit$r8IGDAFN$YYA-NH2 |
| 1471 | Ac-IWIAMO2ALCit$r8IGDAFN$YYA-NH2 |
| 1472 | Ac-RWIAMOALR$IGD$LNAibFYAHH-NH2 |
| 1473 | Ac-RWIAMO2ALR$IGD$LNAibFYAHH-NH2 |
| 1474 | Ac-RWIAQALR$IGN$VNAibFYAHH-NH2 |
| 1475 | Ac-RWIAQAAR$IGD$VNAibFYAHH-NH2 |
| 1476 | Ac-RWIAQALA$IGD$VNAibFYAHH-NH2 |
| 1477 | Ac-RWIAQALCit$IGD$VNAibFYAHH-NH2 |
| 1478 | Ac-RCou2IAQALR$IGD$VNAibFYAHH-NH2 |
| 1479 | Ac-RCou2IAQALR$IGN$VNAibFYAHH-NH2 |
| 1480 | Ac-RCou2IAQAAR$IGD$VNAibFYAHH-NH2 |
| 1481 | Ac-RCou2IAQALA$IGD$VNAibFYAHH-NH2 |
| 1482 | Ac-RCou2IAQALCit$IGD$VNAibFYAHH-NH2 |
| 1483 | Ac-IWChaAQALR$r8IGDAFN$YYA-NH2 |
| 1484 | Ac-IWhhLAQALR$r8IGDAFN$YYA-NH2 |
| 1485 | Ac-IWAdmAQALR$r8IGDAFN$YYA-NH2 |
| 1486 | Ac-IWhChaAQALR$r8IGDAFN$YYA-NH2 |
| 1487 | Ac-IWhFAQALR$r8IGDAFN$YYA-NH2 |
| 1488 | Ac-IWIglAQALR$r8IGDAFN$YYA-NH2 |
| 1489 | Ac-IWF4CF3AQALR$r8IGDAFN$YYA-NH2 |
| 1490 | Ac-IWF4tBuAQALR$r8IGDAFN$YYA-NH2 |
| 1491 | Ac-IW2NalAQALR$r8IGDAFN$YYA-NH2 |
| 1492 | Ac-IWBipAQALR$r8IGDAFN$YYA-NH2 |
| 1493 | Ac-IWIAQAChaR$r8IGDAFN$YYA-NH2 |
| 1494 | Ac-IWIAQAhhLR$r8IGDAFN$YYA-NH2 |
| 1495 | Ac-IWIAQAAdmR$r8IGDAFN$YYA-NH2 |
| 1496 | Ac-IWIAQAhChaR$r8IGDAFN$YYA-NH2 |
| 1497 | Ac-IWIAQAhAdmR$r8IGDAFN$YYA-NH2 |
| 1498 | Ac-IWIAQAhFR$r8IGDAFN$YYA-NH2 |
| 1499 | Ac-IWIAQAIglR$r8IGDAFN$YYA-NH2 |
| 1500 | Ac-IWIAQAF4CF3R$r8IGDAFN$YYA-NH2 |
| 1501 | Ac-IWIAQAF4tBuR$r8IGDAFN$YYA-NH2 |
| 1502 | Ac-IWIAQA2NalR$r8IGDAFN$YYA-NH2 |
| 1503 | Ac-IWIAQABipR$r8IGDAFN$YYA-NH2 |
| 1504 | Ac-IWIAQALR$r8CbaGDAFN$YYA-NH2 |
| 1505 | Ac-IWIAQALR$r8hLGDAFN$YYA-NH2 |
| 1506 | Ac-IWIAQALR$r8ChaGDAFN$YYA-NH2 |
| 1507 | Ac-IWIAQALR$r8TbaGDAFN$YYA-NH2 |
| 1508 | Ac-IWIAQALR$r8hhLGDAFN$YYA-NH2 |
| 1509 | Ac-IAmWIAQALR$r8IGDAFN$YYA-NH2 |
| 1510 | Ac-IAibIAQALR$r8IGDAFN$YYA-NH2 |
| 1511 | Ac-AmLWIAQALR$r8IGDAFN$YYA-NH2 |
| 1512 | Ac-IWAmLAQALR$r8IGDAFN$YYA-NH2 |
| 1513 | Ac-IWIAibQALR$r8IGAmDAFN$YYA-NH2 |
| 1514 | Ac-IWIAAibALR$r8IGDAFN$YYA-NH2 |
| 1515 | Ac-IWIAQAAmLR$r8IGDAFN$YYA-NH2 |
| 1516 | Ac-IWIAQALR$r8IGAmDAFN$YYA-NH2 |
| 1517 | Ac-IWIAQALR$r8IGDAFN$F4FYA-NH2 |
| 1518 | Ac-IWIAQALR$r8IGDAFN$AYA-NH2 |
| 1519 | Ac-IWIAQALR$r8IGDAFN$YF4FA-NH2 |
| 1520 | Ac-IWIAQALR$r8IGDAFN$YYAib-NH2 |
| 1521 | Ac-I$r8IAQALRStIGDEFN$s8YYA-NH2 |
| 1522 | Ac-IWIA$ALRStIGDEFN$s8YYA-NH2 |
| 1523 | Ac-IWIAQALR$r8IGDEFNStYYA$r5A-NH2 |
| 1524 | Ac-IWIAQAACit$r8IGDAFN$YYA-NH2 |
| 1525 | Ac-IWIAQALCit$r8IGNAFN$YYA-NH2 |
| 1526 | Ac-IWIAQALCit$r8IGDAAN$YYA-NH2 |
| 1527 | Ac-IWIAQALCit$r8IGDAVN$YYA-NH2 |
| 1528 | Ac-RWIAQAChaR$IGD$LNAibFYAHH-NH2 |
| 1529 | Ac-RWIAQAhhLR$IGD$LNAibFYAHH-NH2 |
| 1530 | Ac-RWIAQAAdmR$IGD$LNAibFYAHH-NH2 |
| 1531 | Ac-RWIAQAhChaR$IGD$LNAibFYAHH-NH2 |
| 1532 | Ac-RWIAQAhFR$IGD$LNAibFYAHH-NH2 |
| 1533 | Ac-RWIAQAIglR$IGD$LNAibFYAHH-NH2 |
| 1534 | Ac-RWIAQAF4CF3R$IGD$LNAibFYAHH-NH2 |
| 1535 | Ac-RWIAQAF4tBuR$IGD$LNAibFYAHH-NH2 |
| 1536 | Ac-RWIAQA2NalR$IGD$LNAibFYAHH-NH2 |
| 1537 | Ac-RWIAQABipR$IGD$LNAibFYAHH-NH2 |
| 1538 | Ac-IWIAQ$r8LRRIGD$FNAYYA-NH2 |
| 1539 | Ac-IWIAQ$r8LRAIGD$FNAYYA-NH2 |
| 1540 | Ac-IWIAQ$r8LCitRIGD$FNAYYA-NH2 |
| 1541 | Ac-IWIAQ$r8LCitAIGD$FNAYYA-NH2 |
| 1542 | Ac-IWIAMOALCit$r8IGDAFN$YYA-NH2 |
| 1543 | Ac-IWIAMO2ALCit$r8IGDAFN$YYA-NH2 |
| 1544 | Ac-IWIAQALD$r8IGRAFN$YYA-NH2 |
| 1545 | Ac-RWIAQALD$IGR$LNAibFYAHH-NH2 |
| 1546 | Ac-RPEIWIAQAID$r8IGDAVN$YYAR-NH2 |
| 1547 | Ac-RPEIWIAQAID$IGD$VNAYYAR-NH2 |
| 1548 | Ac-DWIAQALR$r8IGDAFN$YYR-NH2 |
| 1549 | Ac-IWAAQALR$r8IGDAFN$YYA-NH2 |
| 1550 | Ac-IWTbaAQALR$r8IGDAFN$YYA-NH2 |
| 1551 | Ac-IWhLAQALR$r8IGDAFN$YYA-NH2 |
| 1552 | Ac-IWChgAQALR$r8IGDAFN$YYA-NH2 |
| 1553 | Ac-IWAc6cAQALR$r8IGDAFN$YYA-NH2 |
| 1554 | Ac-IWAc5cAQALR$r8IGDAFN$YYA-NH2 |
| 1555 | Ac-EWIAAALR$r8IGDAFN$YYA-NH2 |
| 1556 | Ac-RWIAAALR$r8IGDAFN$YYA-NH2 |
| 1557 | Ac-KWIAAALR$r8IGDAFN$YYA-NH2 |
| 1558 | Ac-HWIAAALR$r8IGDAFN$YYA-NH2 |
| 1559 | Ac-SWIAAALR$r8IGDAFN$YYA-NH2 |
| 1560 | Ac-QWIAAALR$r8IGDAFN$YYA-NH2 |
| 1561 | Ac-AWIAAALR$r8IGDAFN$YYA-NH2 |
| 1562 | Ac-AibWIAAALR$r8IGDAFN$YYA-NH2 |
| 1563 | Ac-FWIAAALR$r8IGDAFN$YYA-NH2 |
| 1564 | Ac-IDIAAALR$r8IGDAFN$YYA-NH2 |
| 1565 | Ac-IRIAAALR$r8IGDAFN$YYA-NH2 |
| 1566 | Ac-IHIAAALR$r8IGDAFN$YYA-NH2 |
| 1567 | Ac-ISIAAALR$r8IGDAFN$YYA-NH2 |
| 1568 | Ac-INIAAALR$r8IGDAFN$YYA-NH2 |
| 1569 | Ac-ILIAAALR$r8IGDAFN$YYA-NH2 |
| 1570 | Ac-IFIAAALR$r8IGDAFN$YYA-NH2 |
| 1571 | Ac-I2NalIAAALR$r8IGDAFN$YYA-NH2 |
| 1572 | Ac-IWISAALR$r8IGDAFN$YYA-NH2 |
| 1573 | Ac-IWILAALR$r8IGDAFN$YYA-NH2 |
| 1574 | Ac-IWIFAALR$r8IGDAFN$YYA-NH2 |
| 1575 | Ac-IWIALALR$r8IGDAFN$YYA-NH2 |
| 1576 | Ac-IWIAAALF4g$r8IGDAFN$YYA-NH2 |
| 1577 | Ac-IWIAAALK$r8IGDAFN$YYA-NH2 |
| 1578 | Ac-IWIAAALR$r8IAbuDAFN$YYA-NH2 |
| 1579 | Ac-IWIAAALR$r8IVDAFN$YYA-NH2 |
| 1580 | Ac-IWIAAALR$r8IGEAFN$YYA-NH2 |
| 1581 | Ac-IWIAAALR$r8IGDAGN$YYA-NH2 |
| 1582 | Ac-IWIAQALR$r8IGDAWN$YYA-NH2 |
| 1583 | Ac-IWIAQALR$r8IGDAhFN$YYA-NH2 |
| 1584 | Ac-IWIAQALR$r8IGDAF4CF3N$YYA-NH2 |
| 1585 | Ac-IWIAQALR$r8IGDAF4tBuN$YYA-NH2 |
| 1586 | Ac-IWIAQALR$r8IGDA2NalN$YYA-NH2 |
| 1587 | Ac-IWIAQALR$r8IGDABipN$YYA-NH2 |
| 1588 | Ac-IWIAAALR$r8IGDAFD$YYA-NH2 |
| 1589 | Ac-IWIAAALR$r8IGDAFE$YYA-NH2 |
| 1590 | Ac-IWIAAALR$r8IGDAFQ$YYA-NH2 |
| 1591 | Ac-IWIAAALR$r8IGDAFS$YYA-NH2 |
| 1592 | Ac-IWIAAALR$r8IGDAFH$YYA-NH2 |
| 1593 | Ac-IWIAAALR$r8IGDAFN$LYA-NH2 |
| 1594 | Ac-IWIAQALR$r8IGDAFN$YAA-NH2 |
| 1595 | Ac-IWIAQALR$r8IGDAFN$YLA-NH2 |
| 1596 | Ac-IWIAQALR$r8IGDAFN$YChaA-NH2 |
| 1597 | Ac-IWIAQALR$r8IGDAFN$YhFA-NH2 |
| 1598 | Ac-IWIAQALR$r8IGDAFN$YWA-NH2 |
| 1599 | Ac-IWIAQALR$r8IGDAFN$Y2NalA-NH2 |
| 1600 | Ac-IWIAAALR$r8IGDAFN$YYD-NH2 |
| 1601 | Ac-IWIAAALR$r8IGDAFN$YYE-NH2 |
| 1602 | Ac-IWIAAALR$r8IGDAFN$YYQ-NH2 |
| 1603 | Ac-IWIAAALR$r8IGDAFN$YYS-NH2 |
| 1604 | Ac-IWIAAALR$r8IGDAFN$YYH-NH2 |
| 1605 | Ac-IWIAAALR$r8IGDAFN$YYR-NH2 |
| 1606 | Ac-IWIAAALR$r8IGDAFN$YYK-NH2 |
| 1607 | Ac-IWIAQALR$rda6IGDAFN$da5YYA-NH2 |
| 1608 | Ac-IWIAQAAmLR$r8IGDAFN$YYA-NH2 |
| 1609 | Ac-IWIAQALR$r8IGAmDAFN$YYA-NH2 |
| 1610 | Ac-IWIAQALR$r8IGDAFN$F4FYA-NH2 |
| 1611 | Ac-IWIAQALR$r8IGDAFN$YYAib-NH2 |
| 1612 | Ac-IWIAQAACit$r8IGDAFN$YYA-NH2 |
| 1613 | Ac-IWIAQALCit$r8IGNAFN$YYA-NH2 |
| 1614 | Ac-IWIAQALCit$r8IGDAAN$YYA-NH2 |
| 1615 | Ac-IWIAQALCit$r8IGDAVN$YYA-NH2 |
| 1616 | Ac-IWIAQ$r8LRAIGD$FNAYYA-NH2 |
| 1617 | Ac-IWIAQ$r8LCitAIGD$FNAYYA-NH2 |
| 1618 | Ac-IWIAQALR$r8IGDAFN$AYA-NH2 |
| 1619 | Ac-IWIAQ$r8LRRIGD$FNAYYA-NH2 |
| 1620 | Ac-IWIAQALR$r8hLGDAFN$F4FYA-NH2 |
| 1621 | Ac-IWIAQALR$r8hLGDAFN$YF4FA-NH2 |
| 1622 | Ac-IWIAQALR$r8hLGDAFN$F4FF4FA-NH2 |
| 1623 | Ac-AWIAAALR$r8hLGDAFN$YF4FA-NH2 |
| 1624 | Ac-AWIAAALR$r8hLGDAFN$AF4FA-NH2 |
| 1625 | Ac-IWIAQAAR$r8hLGDAFN$F4FF4FA-NH2 |

[0120] In the sequences shown above and elsewhere, the following abbreviations are used: “Nle” represents norleucine, “Aib” represents 2-aminoisobutyric acid, “Ac” represents acetyl, and “Pr” represents propionyl. Amino acids represented as “$” are alpha-Me S5-pentenyl-alanine olefin amino acids connected by an all-carbon crosslinker comprising one double bond. Amino acids represented as “$r5” are alpha-Me R5-pentenyl-alanine olefin amino acids connected by an all-carbon comprising one double bond. Amino acids represented as “$s8” are alpha-Me S8-octenyl-alanine olefin amino acids connected by an all-carbon crosslinker comprising one double bond. Amino acids represented as “$r8” are alpha-Me R8-octenyl-alanine olefin amino acids connected by an all-carbon crosslinker comprising one double bond. “Ahx” represents an aminocyclohexyl linker. The crosslinkers are linear all-carbon crosslinker comprising eight or eleven carbon atoms between the alpha carbons of each amino acid. Amino acids represented as “$/” are alpha-Me S5-pentenyl-alanine olefin amino acids that are not connected by any crosslinker. Amino acids represented as “$/r5” are alpha-Me R5-pentenyl-alanine olefin amino acids that are not connected by any crosslinker. Amino acids represented as “$/s8” are alpha-Me S8-octenyl-alanine olefin amino acids that are not connected by any crosslinker. Amino acids represented as “$/r8” are alpha-Me R8-octenyl-alanine olefin amino acids that are not connected by any crosslinker. Amino acids represented as “Amw” are alpha-Me tryptophan amino acids. Amino acids represented as “Aml” are alpha-Me leucine amino acids. Amino acids represented as “Amf” are alpha-Me phenylalanine amino acids. Amino acids represented as “2ff” are 2-fluoro-phenylalanine amino acids. Amino acids represented as “3ff” are 3-fluoro-phenylalanine amino acids. Amino acids represented as “St” are amino acids comprising two pentenyl-alanine olefin side chains, each of which is crosslinked to another amino acid as indicated. Amino acids represented as “St//” are amino acids comprising two pentenyl-alanine olefin side chains that are not crosslinked. Amino acids represented as “% St” are amino acids comprising two pentenyl-alanine olefin side chains, each of which is crosslinked to another amino acid as indicated via fully saturated hydrocarbon crosslinks. Amino acids represented as “Ba” are beta-alanine. The lower-case character “e” or “z” within the designation of a crosslinked amino acid (e.g., “$er8” or “$zr8”) represents the configuration of the double bond (E or Z, respectively). In other contexts, lower-case letters such as “a” or “f” represent D amino acids (e.g., D-alanine, or D-phenylalanine, respectively). Amino acids designated as “NmW” represent N-methyltryptophan. Amino acids designated as “NmY” represent N-methyltyrosine. Amino acids designated as “NmA” represent N-methylalanine. “Kbio” represents a biotin group attached to the side chain amino group of a lysine residue. Amino acids designated as “Sar” represent sarcosine. Amino acids designated as “Cha” represent cyclohexyl alanine. Amino acids designated as “Cpg” represent cyclopentyl glycine. Amino acids designated as “Chg” represent cyclohexyl glycine. Amino acids designated as “Cba” represent cyclobutyl alanine. Amino acids designated as “F₄I” represent 4-iodo phenylalanine. “7L” represents N15 isotopic leucine. Amino acids designated as “F₃Cl” represent 3-chloro phenylalanine. Amino acids designated as “F4cooh” represent 4-carboxy phenylalanine. Amino acids designated as “F₃4F₂” represent 3,4-difluoro phenylalanine. Amino acids designated as “6clW” represent 6-chloro tryptophan. Amino acids designated as “$rda6” represent alpha-Me R6-hexynyl-alanine alkynyl amino acids, crosslinked via a dialkyne bond to a second alkynyl amino acid. Amino acids designated as “$da5” represent alpha-Me S5-pentynyl-alanine alkynyl amino acids, wherein the alkyne forms one half of a dialkyne bond with a second alkynyl amino acid. Amino acids designated as “$ra9” represent alpha-Me R9-nonynyl-alanine alkynyl amino acids, crosslinked via an alkyne metathesis reaction with a second alkynyl amino acid. Amino acids designated as “$a6” represent alpha-Me S6-hexynyl-alanine alkynyl amino acids, crosslinked via an alkyne metathesis reaction with a second alkynyl amino acid. The designation “iso1” or “iso2” indicates that the peptidomimetic macrocycle is a single isomer. Amino acids designated as “Cit” represent citrulline.

[0121] Amino acids which are used in the formation of triazole crosslinkers are represented according to the legend indicated below. Stereochemistry at the alpha position of each amino acid is S unless otherwise indicated. For azide amino acids, the number of carbon atoms indicated refers to the number of methylene units between the alpha carbon and the terminal azide. For alkyne amino acids, the number of carbon atoms indicated is the number of methylene units between the alpha position and the triazole moiety plus the two carbon atoms within the triazole group derived from the alkyne.

| | |
|---|---|
| $5a5 | Alpha-Me alkyne 1,5 triazole (5 carbon) |
| $5n3 | Alpha-Me azide 1,5 triazole (3 carbon) |
| $4rn6 | Alpha-Me R-azide 1,4 triazole (6 carbon) |
| $4a5 | Alpha-Me alkyne 1,4 triazole (5 carbon) |

[0122] In some embodiments, peptidomimetic macrocycles are provided which are derived from BIM. In some embodiments, the present invention provides a peptidomimetic macrocycle comprising an amino acid sequence which is at least about 60% identical to BIM, further comprising at least two macrocycle-forming linkers, wherein the first of said two macrocycle-forming linkers connects a first amino acid to a second amino acid, and the second of said two macrocycle-forming linkers connects a third amino acid to a fourth amino acid.

[0123] Two or more peptides can share a degree of homology. In some embodiments, the pair of peptides is a peptidomimetic macrocycle of the present disclosure and a peptide identical to BIM. A pair of peptides can have, for example, up to about 20% pairwise homology, up to about 25% pairwise homology, up to about 30% pairwise homology, up to about 35% pairwise homology, up to about 40% pairwise homology, up to about 45% pairwise homology, up to about 50% pairwise homology, up to about 55% pairwise homology, up to about 60% pairwise homology, up to about 65% pairwise homology, up to about 70% pairwise homology, up to about 75% pairwise homology, up to about 80% pairwise homology, up to about 85% pairwise homology, up to about 90% pairwise homology, up to about 95% pairwise homology, up to about 96% pairwise homology, up to about 97% pairwise homology, up to about 98% pairwise homology, up to about 99% pairwise homology, up to about 99.5% pairwise homology, or up to about 99.9% pairwise homology. A pair of peptides can have, for example, at least about 20% pairwise homology, at least about 25% pairwise homology, at least about 30% pairwise homology, at least about 35% pairwise homology, at least about 40% pairwise homology, at least about 45% pairwise homology, at least about 50% pairwise homology, at least about 55% pairwise homology, at least about 60% pairwise homology, at least about 65% pairwise homology, at least about 70% pairwise homology, at least about 75% pairwise homology, at least about 80% pairwise homology, at least about 85% pairwise homology, at least about 90% pairwise homology, at least about 95% pairwise homology, at least about 96% pairwise homology, at least about 97% pairwise homology, at least about 98% pairwise homology, at least about 99% pairwise homology, at least about 99.5% pairwise homology, at least about 99.9% pairwise homology.

[0124] Various methods and software programs can be used to determine the homology between two or more peptides, such as NCBI BLAST, Clustal W, MAFFT, Clustal Omega, AlignMe, Praline, or another suitable method or algorithm.

[0125] In some embodiments, a peptidomimetic macrocycle of the invention comprises a helix, for example an α-helix. In some embodiments, a peptidomimetic macrocycle of the invention comprises an α,α-disubstituted amino acid. In some embodiments, each amino acid connected by the macrocycle-forming linker is an α,α-disubstituted amino acid.

[0126] In some embodiments, a peptidomimetic macrocycle of the invention has the Formula (I):

[chemical structure]

wherein:

[0127] each A, C, D, and E is independently an amino acid (including natural or non-natural amino acids and amino acid analogues) and the terminal D and E independently optionally include a capping group;

[0128] each B is independently an amino acid (including natural or non-natural amino acids and amino acid analogues),

[chemical structure]

[—NH-L₃-CO—], [—NH-L₃-SO₂—], or [—NH-L₃-];

[0129] each R₁ and R₂ is independently —H, alkyl, alkenyl, alkynyl, arylalkyl, cycloalkyl, cycloalkylalkyl, heteroalkyl, or heterocycloalkyl, unsubstituted or substituted with halo-; or at least one of R₁ and R₂ forms a macrocycle-forming linker L′ connected to the alpha position of one of said D or E amino acids;

[0130] each R₃ is independently hydrogen, alkyl, alkenyl, alkynyl, arylalkyl, heteroalkyl, cycloalkyl, heterocycloalkyl, cycloalkylalkyl, cycloaryl, or heterocycloaryl, optionally substituted with R₅;
[0131] each L and L′ is independently a macrocycle-forming linker of the formula -L₁-L₂-,

[chemical structure]

or -L₁-S-L₂-S-L₃-;

[0132] each L₁, L₂ and L₃ is independently alkylene, alkenylene, alkynylene, heteroalkylene, cycloalkylene, heterocycloalkylene, cycloarylene, heterocycloarylene, or [—R₄—K—R₄-]ₙ, each being optionally substituted with R₅; when L is not

[chemical structure]

or -L₁-S-L₂-S-L₃-, L₁ and L₂ are alkylene, alkenylene, alkynylene, heteroalkylene, cycloalkylene, heterocycloalkylene, cycloarylene, or heterocycloarylene;

[0133] each R₄ is independently alkylene, alkenylene, alkynylene, heteroalkylene, cycloalkylene, heterocycloalkylene, arylene, or heteroarylene;

[0134] each K is independently O, S, SO, SO₂, CO, CO₂, or CONR₃;

[0135] each R₅ is independently halogen, alkyl, —OR₆, —N(R₆)₂, —SR₆, —SOR₆, —SO₂R₆, —CO₂R₆, a fluorescent moiety, a radioisotope or a therapeutic agent;

[0136] each R₆ is independently —H, alkyl, alkenyl, alkynyl, arylalkyl, cycloalkylalkyl, heterocycloalkyl, a fluorescent moiety, a radioisotope or a therapeutic agent;

[0137] each R₇ is independently —H, alkyl, alkenyl, alkynyl, arylalkyl, cycloalkyl, heteroalkyl, cycloalkylalkyl, heterocycloalkyl, cycloaryl, or heterocycloaryl, optionally substituted with R₅, or part of a cyclic structure with a D residue;

[0138] each R₈ is independently —H, alkyl, alkenyl, alkynyl, arylalkyl, cycloalkyl, heteroalkyl, cycloalkylalkyl, heterocycloalkyl, cycloaryl, or heterocycloaryl, optionally substituted with R₅, or part of a cyclic structure with an E residue;

[0139] each R₉ is independently absent, hydrogen, alkyl, alkenyl, alkynyl, aryl, cycloalkyl, cycloalkenyl, heteroaryl, or heterocyclyl group, unsubstituted or optionally substituted with Rₐ or R_{b};

[0140] each Rₐ and R_{b} is independently alkyl, OCH₃, CF₃, NH₂, CH₂NH₂, F, Br, I,

[chemical structure]

[0141] each v and w is independently an integer from 0-1000, for example 0-500, 0-200, 0-100, 0-50, 0-30, 0-20, or 0-10;

[0142] u is 1, 2, 3, 4, 5, 6, 7, 8, 9, or 10, for example 1-5, 1-3 or 1-2;

[0143] each x, y and z is independently 0, 1, 2, 3, 4, 5, 6, 7, 8, 9, or 10, for example the sum of x+y+z is 2, 3, or 6;

[0144] each n is independently 1, 2, 3, 4, or 5; and

wherein A, B, C, D, and E, taken together with the crosslinked amino acids connected by the macrocycle-forming linker, -L₁-L₂-, form an amino acid sequence of the peptidomimetic macrocycle which is at least about 60%, 65%, 70%, 75%, 80%, 85%, 90%, 95%, 96%, 97%, 98%, or 99% identical to BIM 1-44, BIM 1-29 or to an amino acid sequence chosen from the group consisting of the amino acid sequences in Table 1;

[0145] In some embodiments, u is 1.

[0146] In some embodiments, the sum of x+y+z is 2, 3, 6, or 10, for example 2, 3 or 6, for example 3 or 6.

[0147] In some embodiments, the sum of x+y+z is 3.

[0148] In some embodiments, each of v and w is independently 1, 2, 3, 4, 5, 6, 7, 8, 9, or 10. In some embodiments, each of v and w is independently 1, 2, 3, 4, 5, 6, 7, 8, 9, 10, 11, 12, 13, 14, or 15. In some embodiments, each of v and w is independently 1, 2, 3, 4, 5, 6, 7, 8, 9, 10, 11, 12, 13, 14, 15, 16, 17, 18, 19, or 20. In some embodiments, each of v and w is independently 1, 2, 3, 4, 5, 6, 7, 8, 9, 10, 11, 12, 13, 14, 15, 16, 17, 18, 19, 20, 21, 22, 23, 24, or 25.

[0149] In some embodiments, each of v and w is independently 1, 2, 3, 4, 5, 6, 7, 8, 9, 10, 11, 12, 13, 14, or 15.

[0150] In some embodiments, each of v and w is independently 1, 2, 3, 4, 5, 6, 7, 8, 9, 10, 11, 12, 13, 14, 15, 16, 17, 18, 19, 20, 21, 22, 23, 24, 25, 26, 27, 28, 29, or 30. In some embodiments, w is an integer from 3-1000, for example 3-500, 3-200, 3-100, 3-50, 3-30, 3-20, or 3-10. In some embodiments, the sum of x+y+z is 3 or 6. In some embodiments, the sum of x+y+z is 3. In other embodiments, the sum of x+y+z is 6.

[0151] In some embodiments, w is 3, 4, 5, 6, 7, 8, 9, or 10. In some embodiments, w is 3, 4, 5, or 6. In some embodiments, w is 3, 4, 5, 6, 7, or 8. In some embodiments, w is 6, 7, 8, 9, or 10. In some embodiments, w is 3. In other embodiments, w is 6. In some embodiments, v is an integer from 1-1000, for example 1-500, 1-200, 1-100, 1-50, 1-30, 1-20, or 1-10. In some embodiments, v is 2.

[0152] In some embodiments, L₁ and L₂ are independently alkylene, alkenylene or alkynylene.

[0153] In some embodiments, L₁ and L₂ are independently C₃-C₁₀ alkylene or alkenylene.

[0154] In some embodiments, L₁ and L₂ are independently C₃-C₆ alkylene or alkenylene.

[0155] In some embodiments, L or L′ is:

[chemical structure]

[0156] In some embodiments, L or L′ is

[chemical structure]

[0157] For example, L or L′ is

[chemical structure]

[0158] In some embodiments, R₁ and R₂ are H.

[0159] In some embodiments, R₁ and R₂ are independently alkyl.

[0160] In some embodiments, R₁ and R₂ are methyl.

[0161] In some embodiments, the present invention provides a peptidomimetic macrocycle having the Formula (Ia):

[chemical structure]

wherein:

[0162] R₈′ is —H, alkyl, alkenyl, alkynyl, arylalkyl, cycloalkyl, heteroalkyl, cycloalkylalkyl, heterocycloalkyl, cycloaryl, or heterocycloaryl, optionally substituted with R₅, or part of a cyclic structure with a E residue;

[0163] v′ and w′ are independently integers from 0-100; and

[0164] x′, y′ and z′ are independently 0, 1, 2, 3, 4, 5, 6, 7, 8, 9, or 10, for example, x′+y′+z′ is 2, 3, 6 or 10.

[0165] In some embodiments, u is 2.

[0166] In some embodiments, the peptidomimetic macrocycle of Formula (I) has the Formula (Ib):

[chemical structure]

wherein:

[0167] R₇′ is —H, alkyl, alkenyl, alkynyl, arylalkyl, cycloalkyl, heteroalkyl, cycloalkylalkyl, heterocycloalkyl, cycloaryl, or heterocycloaryl, optionally substituted with R₅, or part of a cyclic structure with a D residue;

[0168] R₈′ is —H, alkyl, alkenyl, alkynyl, arylalkyl, cycloalkyl, heteroalkyl, cycloalkylalkyl, heterocycloalkyl, cycloaryl, or heterocycloaryl, optionally substituted with R₅, or part of a cyclic structure with an E residue;

[0169] v′ and w′ are independently integers from 0-100; and

[0170] x′, y′ and z′ are independently 0, 1, 2, 3, 4, 5, 6, 7, 8, 9, or 10.

[0171] In some embodiments, the sum of x+y+z is 2, 3 or 6, for example 3 or 6.

[0172] In some embodiments, the sum of x′+y′+z′ is 2, 3 or 6, for example 3 or 6.

[0173] In some embodiments, each of v and w is independently 1, 2, 3, 4, 5, 6, 7, 8, 9, or 10. In some embodiments, each of v and w is independently 1, 2, 3, 4, 5, 6, 7, 8, 9, 10, 11, 12, 13, 14, or 15. In some embodiments, each of v and w is independently 1, 2, 3, 4, 5, 6, 7, 8, 9, 10, 11, 12, 13, 14, 15, 16, 17, 18, 19, or 20. In some embodiments, each of v and w is independently 1, 2, 3, 4, 5, 6, 7, 8, 9, 10, 11, 12, 13, 14, 15, 16, 17, 18, 19, 20, 21, 22, 23, 24, or 25.

[0174] In some embodiments, each v and w is independently 1, 2, 3, 4, 5, 6, 7, 8, 9, 10, 11, 12, 13, 14, 15, 16, 17, 18, 19, 20, 21, 22, 23, 24, 25, 26, 27, 28, 29, or 30. In some embodiments, w is an integer from 3-1000, for example 3-500, 3-200, 3-100, 3-50, 3-30, 3-20, or 3-10. In some embodiments, the sum of x+y+z is 3 or 6. In some embodiments, the sum of x+y+z is 3. In other embodiments, the sum of x+y+z is 6.

[0175] In some embodiments, w is 3, 4, 5, 6, 7, 8, 9, or 10. In some embodiments, w is 3, 4, 5, or 6. In some embodiments, w is 3, 4, 5, 6, 7, or 8. In some embodiments, w is 6, 7, or 8. In some embodiments, w is 6, 7, 8, 9, or 10. In some embodiments, w is 3. In other embodiments, w is 6. In some embodiments, v is an integer from 1-1000, for example 1-500, 1-200, 1-100, 1-50, 1-30, 1-20, or 1-10. In some embodiments, v is 2.

[0176] In some embodiments, a peptidomimetic macrocycle of the invention comprises an amino acid sequence which is at least about 60%, 65%, 70%, 75%, 80%, 85%, 90%, 95%, 96%, 97%, 98%, or 99% identical to an amino acid sequence of Table 1, and comprising at least one macrocycle-forming linker, wherein the macrocycle-forming linker connects amino acids 14 and 18.

[0177] In some embodiments, a peptidomimetic macrocycle of Formula (I) has Formula (Ic):

[chemical structure]

wherein:

[0178] each A, C, D, and E is independently a natural or non-natural amino acid;

[0179] each B is independently a natural or non-natural amino acid, amino acid analogue,

[chemical structure]

[—NH-L₃-CO—], [—NH-L₃-SO₂—], or [—NH-L₃-];

[0180] each L is independently a macrocycle-forming linker;

[0181] each L′ is independently alkylene, alkenylene, alkynylene, heteroalkylene, cycloalkylene, heterocycloalkylene, arylene, or heteroarylene, each being optionally substituted with R₅, or a bond, or together with R₁ and the atom to which both R₁ and L′ are bound forms a ring;

[0182] each L″ is independently alkylene, alkenylene, alkynylene, heteroalkylene, cycloalkylene, heterocycloalkylene, arylene, or heteroarylene, each being optionally substituted with R₅, or a bond, or together with R₂ and the atom to which both R₂ and L″ are bound forms a ring;

[0183] each R₁ is independently-H, alkyl, alkenyl, alkynyl, arylalkyl, cycloalkyl, cycloalkylalkyl, heteroalkyl, or heterocycloalkyl, unsubstituted or substituted with halo-, or together with L′ and the atom to which both R₁ and L′ are bound forms a ring;

[0184] each R₂ is independently-H, alkyl, alkenyl, alkynyl, arylalkyl, cycloalkyl, cycloalkylalkyl, heteroalkyl, or heterocycloalkyl, unsubstituted or substituted with halo-, or together with L″ and the atom to which both R₂ and L″ are bound forms a ring;

[0185] each R₃ is independently hydrogen, alkyl, alkenyl, alkynyl, arylalkyl, heteroalkyl, cycloalkyl, heterocycloalkyl, cycloalkylalkyl, aryl, or heteroaryl, optionally substituted with R₅;

[0186] each L₃ is independently alkylene, alkenylene, alkynylene, heteroalkylene, cycloalkylene, heterocycloalkylene, arylene, heteroarylene, or [—R₄—K—R₄-]ₙ, each being optionally substituted with R₅;

[0187] each R₄ is independently alkylene, alkenylene, alkynylene, heteroalkylene, cycloalkylene, heterocycloalkylene, arylene, or heteroarylene;

[0188] each K is independently O, S, SO, SO₂, CO, CO₂, or CONR₃;

[0189] n is 1, 2, 3, 4, or 5;

[0190] each R₅ is independently halogen, alkyl, —OR₆, —N(R₆)₂, —SR₆, —SOR₆, —SO₂R₆, —CO₂R₆, a fluorescent moiety, a radioisotope or a therapeutic agent;

[0191] each R₆ is independently —H, alkyl, alkenyl, alkynyl, arylalkyl, cycloalkylalkyl, heterocycloalkyl, a fluorescent moiety, a radioisotope or a therapeutic agent;

[0192] each R₇ is independently —H, alkyl, alkenyl, alkynyl, arylalkyl, cycloalkyl, heteroalkyl, cycloalkylalkyl, heterocycloalkyl, aryl, or heteroaryl, optionally substituted with R₅, or part of a cyclic structure with a D residue;

[0193] each R₈ is independently —H, alkyl, alkenyl, alkynyl, arylalkyl, cycloalkyl, heteroalkyl, cycloalkylalkyl, heterocycloalkyl, aryl, or heteroaryl, optionally substituted with R₅, or part of a cyclic structure with an E residue;

[0194] each v and w is independently an integer from 1-1000, for example 1-500, 1-200, 1-100, 1-50, 1-40, 1-25, 1-20, 1-15, or 1-10;

[0195] u is 1, 2, 3, 4, 5, 6, 7, 8, 9, or 10; and

[0196] each x, y and z is independently 0, 1, 2, 3, 4, 5, 6, 7, 8, 9, or 10.

[0197] In some embodiments, the peptidomimetic macrocycle comprises two crosslinks, wherein a first crosslink is of a first pair of amino acid residues, and a second crosslink is of a second pair of amino acid residues. In some embodiments, the first pair of amino acid residues and the second pair of amino acid residues do not share a common amino acid residue. In some embodiments, the first pair of amino acid residues and the second pair of amino acid residues share one common amino acid residue.

[0198] In some embodiments, w is at least about 1, at least about 2, at least about 3, at least about 4, at least about 5, at least about 6, at least about 7, at least about 8, at least about 9, or at least about 10. In some embodiments, w is from about 1 to about 2, from about 2 to about 3, from about 3 to about 4, from about 4 to about 5, from about 5 to about 6, from about 6 to about 7, from about 7 to about 8, from about 8 to about 9, or from about 9 to about 10.

[0199] In some embodiments, w is at least 2 and at least one of the last two E residues is a His residue. In some embodiments, w is at least 2 and at least one of the last two E residues is an Arg residue. In some embodiments, w is at least 2 and both of the last two E residues are His residues. In some embodiments, w is at least 2 and both of the last two E residues are Arg residues. The number of His residues at the peptide C-terminus, or at the E variable, can be 1, 2, 3, 4, 5, 6, 7, 8, 9, or 10. The His residues can be contiguous, or interrupted by a gap of i, i+1, i+2, i+3, or i+4.

[0200] In some embodiments, the peptidomimetic macrocycle comprises a helix. In some embodiments, the peptidomimetic macrocycle comprises an α-helix. In some embodiments, each of v and w is independently 1, 2, 3, 4, 5, 6, 7, 8, 9, 10, 11, 12, 13, 14, or 15. In some embodiments, each of v and w is independently 3, 4, 5, 6, 7, 8, 9, or 10. In some embodiments, v is 8. In some embodiments, w is 6. In some embodiments, the crosslinked amino acid residues are at positions 9 and 13 of the peptidomimetic macrocycle.

[0201] In some embodiments, L is

[chemical structure]

[0202] In some embodiments, R¹ and R² are H. In some embodiments, R¹ and R² are independently alkyl. In some embodiments, R¹ and R² are methyl.

[0203] In some embodiments, the peptidomimetic macrocycles have the Formula (I):

[chemical structure]

wherein:

[0204] each A, C, D, and E is independently a natural or non-natural amino acid;

[0205] each B is independently a natural or non-natural amino acid, amino acid analogue,

[chemical structure]

[—NH-L₃-CO—], [—NH-L₃-SO₂—], or [—NH-L₃-];

[0206] each R₁ and R₂ is independently —H, alkyl, alkenyl, alkynyl, arylalkyl, cycloalkyl, cycloalkylalkyl, heteroalkyl, or heterocycloalkyl, unsubstituted or substituted with halo-;

[0207] each R₃ is independently hydrogen, alkyl, alkenyl, alkynyl, arylalkyl, heteroalkyl, cycloalkyl, heterocycloalkyl, cycloalkylalkyl, aryl, or heteroaryl, optionally substituted with R₅;

[0208] each L is independently a macrocycle-forming linker of the formula

[chemical structure]

[0209] each L₁, L₂ and L₃ is independently alkylene, alkenylene, alkynylene, heteroalkylene, cycloalkylene, heterocycloalkylene, arylene, heteroarylene, or [—R₄—K—R₄-]ₙ, each being optionally substituted with R₅;

[0210] each R₄ is independently alkylene, alkenylene, alkynylene, heteroalkylene, cycloalkylene, heterocycloalkylene, arylene, or heteroarylene;

[0211] each K is independently O, S, SO, SO₂, CO, CO₂, or CONR₃;

[0212] each R₅ is independently halogen, alkyl, —OR₆, —N(R₆)₂, —SR₆, —SOR₆, —SO₂R₆, —CO₂R₆, a fluorescent moiety, a radioisotope or a therapeutic agent;

[0213] each R₆ is independently —H, alkyl, alkenyl, alkynyl, arylalkyl, cycloalkylalkyl, heterocycloalkyl, a fluorescent moiety, a radioisotope or a therapeutic agent;

[0214] each R₇ is independently —H, alkyl, alkenyl, alkynyl, arylalkyl, cycloalkyl, heteroalkyl, cycloalkylalkyl, heterocycloalkyl, aryl, or heteroaryl, optionally substituted with R₅, or part of a cyclic structure with a D residue;

[0215] each R₈ is independently —H, alkyl, alkenyl, alkynyl, arylalkyl, cycloalkyl, heteroalkyl, cycloalkylalkyl, heterocycloalkyl, aryl, or heteroaryl, optionally substituted with R₅, or part of a cyclic structure with an E residue;

[0216] each v and w is independently an integer from 1-1000;

[0217] u is 1, 2, 3, 4, 5, 6, 7, 8, 9, or 10;

[0218] each x, y and z is independently 0, 1, 2, 3, 4, 5, 6, 7, 8, 9, or 10; and

[0219] n is 1, 2, 3, 4, or 5.

[0220] In other embodiments, provided are peptidomimetic macrocycles comprising Formula (II) or (IIa):

[chemical structure]

wherein:

[0221] each A, C, D, and E is independently a natural or non-natural amino acid, and the terminal D and E independently optionally include a capping group;

[0222] each B is independently a natural or non-natural amino acid, amino acid analogue,

[chemical structure]

[—NH-L₃-CO—], [—NH-L₃-SO₂—], or [—NH-L₃-];

[0223] each R₁ and R₂ is independently —H, alkyl, alkenyl, alkynyl, arylalkyl, cycloalkyl, cycloalkylalkyl, heteroalkyl, or heterocycloalkyl, unsubstituted or substituted with halo-; or at least one of R₁ and R₂ forms a macrocycle-forming linker U connected to the alpha position of one of said D or E amino acids;

[0224] each R₃ is independently hydrogen, alkyl, alkenyl, alkynyl, arylalkyl, heteroalkyl, cycloalkyl, heterocycloalkyl, cycloalkylalkyl, cycloaryl, or heterocycloaryl, optionally substituted with R₅;

[0225] each L₁, L₂, and L₃ is independently alkylene, alkenylene, alkynylene, heteroalkylene, cycloalkylene, heterocycloalkylene, cycloarylene, heterocycloarylene, or [—R₄—K—R₄-]ₙ, each being optionally substituted with R₅;

[0226] each R₄ is independently alkylene, alkenylene, alkynylene, heteroalkylene, cycloalkylene, heterocycloalkylene, arylene, or heteroarylene;

[0227] each K is independently O, S, SO, SO₂, CO, CO₂, or CONR₃;

[0228] each R₅ is independently halogen, alkyl, —OR₆, —N(R₆)₂, —SR₆, —SOR₆, —SO₂R₆, —CO₂R₆, a fluorescent moiety, a radioisotope or a therapeutic agent;

[0229] each R₆ is independently —H, alkyl, alkenyl, alkynyl, arylalkyl, cycloalkylalkyl, heterocycloalkyl, a fluorescent moiety, a radioisotope or a therapeutic agent;

[0230] each R₇ is independently —H, alkyl, alkenyl, alkynyl, arylalkyl, cycloalkyl, heteroalkyl, cycloalkylalkyl, heterocycloalkyl, cycloaryl, or heterocycloaryl, optionally substituted with R₅;

[0231] each v and w is independently an integer from 0-100;

[0232] u is 1, 2, 3, 4, 5, 6, 7, 8, 9, or 10;

[0233] each x, y and z is independently 0, 1, 2, 3, 4, 5, 6, 7, 8, 9, or 10;

[0234] n is 1, 2, 3, 4, or 5; and

[0235] A, B, C, and E, taken together with the crosslinked amino acids connected by the macrocycle-forming linker -L₁-L₂-, form an amino acid sequence of the peptidomimetic macrocycle which is at least about 60%, 65%, 70%, 75%, 80%, 85%, 90%, 95%, 96%, 97%, 98%, 99%, or 100% identical to a sequence of Table 1.

[0236] In some embodiments, a peptidomimetic macrocycle comprises Formula (IIIa) or (IIIb):

[chemical structure]

wherein:

[0237] each A, C, D and E is independently an amino acid, and the terminal D and E independently optionally include a capping group;

[0238] each B is independently an amino acid,

[chemical structure]

[—NH-L₃-CO—], [—NH-L₃-SO₂—], or [—NH-L₃-];

[0239] each R₁′ and R₂ is independently —H, alkyl, alkenyl, alkynyl, arylalkyl, cycloalkyl, cycloalkylalkyl, heteroalkyl, or heterocycloalkyl, unsubstituted or substituted with halo-; or R₂ forms a macrocycle-forming linker L′ connected to the alpha position of one of said E amino acids;

[0240] each R₃ is independently hydrogen, alkyl, alkenyl, alkynyl, arylalkyl, heteroalkyl, cycloalkyl, heterocycloalkyl, cycloalkylalkyl, cycloaryl, or heterocycloaryl, optionally substituted with R₅;

[0241] each L and L′ is independently a macrocycle-forming linker of the formula -L₁-L₂-,

[chemical structure]

or -L₁-S-L₂-S-L₃-;

[0242] each L₁, L₂ and L₃ is independently alkylene, alkenylene, alkynylene, heteroalkylene, cycloalkylene, heterocycloalkylene, cycloarylene, heterocycloarylene, or [—R₄—K—R₄-]ₙ, each being optionally substituted with R₅;

[0243] each R₄ is independently alkylene, alkenylene, alkynylene, heteroalkylene, cycloalkylene, heterocycloalkylene, arylene, or heteroarylene;

[0244] each K is independently O, S, SO, SO₂, CO, CO₂, or CONR₃;

[0245] each R₅ is independently halogen, alkyl, —OR₆, —N(R₆)₂, —SR₆, —SOR₆, —SO₂R₆, —CO₂R₆, a fluorescent moiety, a radioisotope or a therapeutic agent;

[0246] each R₆ is independently —H, alkyl, alkenyl, alkynyl, arylalkyl, cycloalkylalkyl, heterocycloalkyl, a fluorescent moiety, a radioisotope or a therapeutic agent;

[0247] each R₇ or R₇′ is independently —H, alkyl, alkenyl, alkynyl, arylalkyl, cycloalkyl, heteroalkyl, cycloalkylalkyl, heterocycloalkyl, cycloaryl, or heterocycloaryl, optionally substituted with R₅, or part of a cyclic structure with a D residue;

[0248] each R₈ or R₈′ is independently —H, alkyl, alkenyl, alkynyl, arylalkyl, cycloalkyl, heteroalkyl, cycloalkylalkyl, heterocycloalkyl, cycloaryl, or heterocycloaryl, optionally substituted with R₅, or part of a cyclic structure with an E residue;

[0249] each R₉ is independently absent, hydrogen, alkyl, alkenyl, alkynyl, aryl, cycloalkyl, cycloalkenyl, heteroaryl, or heterocyclyl group, unsubstituted or optionally substituted with Rₐ or R_{b};

[0250] each Rₐ and R_{b} is independently alkyl, OCH₃, CF₃, NH₂, CH₂NH₂, F, Br, I,

[chemical structure]

[0251] each v′ and w is independently an integer from 0-1000, for example 0-500, 0-200, 0-100, 0-50, 0-30, 0-20, or 0-10;

[0252] u is 1, 2, 3, 4, 5, 6, 7, 8, 9, or 10, for example 1, 2, 3, 4, or 5; 1, 2, or 3; or 1 or 2;

[0253] each x, y, z, x′, y′ and z′ is independently 0, 1, 2, 3, 4, 5, 6, 7, 8, 9, or 10, for example the sum of x+y+z is 2, 3, 6 or 10, or the sum of x′+y′+z′ is 2, 3, 6, or 10;

[0254] n is 1, 2, 3, 4, or 5;

[0255] X is C═O, CHR_{c}, or C═S;

[0256] R_{c} is alkyl, alkenyl, alkynyl, arylalkyl, cycloalkyl, cycloalkylalkyl, heteroalkyl, or heterocycloalkyl; and

[0257] A, B, C, and E, taken together with the crosslinked amino acids connected by the macrocycle-forming linker -L₁-L₂-, form an amino acid sequence of the peptidomimetic macrocycle which is at least about 60%, 65%, 70%, 75%, 80%, 85%, 90%, 95%, 96%, 97%, 98%, 99%, or 100% identical to a sequence of Table 1.

[0258] In some embodiments, the peptidomimetic macrocycle has the Formula:

[chemical structure]

wherein:

[0259] each R₁′ or R₂′ is independently —H, alkyl, alkenyl, alkynyl, arylalkyl, cycloalkyl, cycloalkylalkyl, heteroalkyl, or heterocycloalkyl, unsubstituted or substituted with halo-; and

[0260] each v, w, v′ or w′ is independently an integer from 0-100.

[0261] In some embodiments, the notation “Hep” is used for a macrocycle of Formula Ma, which represents an N-terminal heptenoic capping group of the following formula:

[chemical structure]

wherein AA₁, AA₂, AA₃ and AA₄ are amino acids.

[0262] In other embodiments, a C-terminal macrocycle of Formula IIIb forms the structure:

[chemical structure]

[0263] In some embodiments, the peptidomimetic macrocycle has the Formula IV:

[chemical structure]

wherein:

[0264] each A, C, D, and E is independently an amino acid;

[0265] each B is independently an amino acid,

[chemical structure]

[—NH-L₄-CO—], [—NH-L₄-SO₂—], or [—NH-L₄-];

[0266] each R₁ and R₂ is independently —H, alkyl, alkenyl, alkynyl, arylalkyl, cycloalkyl, cycloalkylalkyl, heteroalkyl, or heterocycloalkyl, unsubstituted or substituted with halo-; or at least one of R₁ and R₂ forms a macrocycle-forming linker L′ connected to the alpha position of one of said D or E amino acids;

[0267] each R₃ is independently hydrogen, alkyl, alkenyl, alkynyl, arylalkyl, heteroalkyl, cycloalkyl, heterocycloalkyl, cycloalkylalkyl, cycloaryl, or heterocycloaryl, optionally substituted with R₅;

[0268] each L₁, L₂, L₃ and L₄ is independently alkylene, alkenylene, alkynylene, heteroalkylene, cycloalkylene, heterocycloalkylene, cycloarylene, heterocycloarylene or [—R₄—K—R₄]ₙ, each being unsubstituted or substituted with R₅;

[0269] each K is independently O, S, SO, SO₂, CO, CO₂, or CONR₃;

[0270] each R₄ is independently alkylene, alkenylene, alkynylene, heteroalkylene, cycloalkylene, heterocycloalkylene, arylene, or heteroarylene;

[0271] each R₅ is independently halogen, alkyl, —OR₆, —N(R₆)₂, —SR₆, —SOR₆, —SO₂R₆, —CO₂R₆, a fluorescent moiety, a radioisotope or a therapeutic agent;

[0272] each R₆ is independently —H, alkyl, alkenyl, alkynyl, arylalkyl, cycloalkylalkyl, heterocycloalkyl, a fluorescent moiety, a radioisotope or a therapeutic agent;

[0273] each R₇ is independently —H, alkyl, alkenyl, alkynyl, arylalkyl, cycloalkyl, heteroalkyl, cycloalkylalkyl, heterocycloalkyl, cycloaryl, or heterocycloaryl, optionally substituted with R₅, or part of a cyclic structure with a D residue;

[0274] each R₈ is independently —H, alkyl, alkenyl, alkynyl, arylalkyl, cycloalkyl, heteroalkyl, cycloalkylalkyl, heterocycloalkyl, cycloaryl, or heterocycloaryl, optionally substituted with R₅, or part of a cyclic structure with an E residue;

[0275] each v and w is independently an integer from 1-1000, for example 1-500, 1-200, 1-100, 1-50, 1-30, 1-20 or 1-10;

[0276] u is 1, 2, 3, 4, 5, 6, 7, 8, 9, or 10, for example 1, 2, 3, 4, or 5; 1, 2, or 3; or 1 or 2;

[0277] each x, y and z is independently 0, 1, 2, 3, 4, 5, 6, 7, 8, 9, or 10, for example the sum of x+y+z is 2, 3, 6 or 10, for example sum of x+y+z is 2, 3 or 6; and

[0278] n is 1, 2, 3, 4, or 5.

[0279] In some embodiments, the peptidomimetic macrocycle has the Formula (V):

[chemical structure]

wherein:

[0280] each D and E is independently an amino acid residue;

[0281] R¹ and R² are independently —H, alkyl, alkenyl, alkynyl, arylalkyl, cycloalkyl, cycloalkylalkyl, heteroalkyl, or heterocycloalkyl, each being optionally substituted with halo-; or at least one of R¹ and R² forms a macrocycle-forming linker L′ connected to the alpha position of one of the D or E amino acid residues;

[0282] each L or L′ is independently a macrocycle-forming linker of the formula -L¹-L²- or -L¹-L²-L³-;

[0283] each L¹, L², and L³ is independently alkylene, alkenylene, alkynylene, heteroalkylene, cycloalkylene, heterocycloalkylene, arylene, heteroarylene, or [—R⁴—K—R⁴-]ₙ, each being optionally substituted with R⁵;

[0284] each R³ is independently —H, alkyl, alkenyl, alkynyl, arylalkyl, cycloalkyl, heteroalkyl, cycloalkylalkyl, heterocycloalkyl, aryl, or heteroaryl, each being optionally substituted with R⁵;

[0285] each R⁴ is independently alkylene, alkenylene, alkynylene, heteroalkylene, cycloalkylene, heterocycloalkylene, arylene, or heteroarylene, each being optionally substituted with R⁵;

[0286] each K is independently O, S, SO, SO₂, CO, CO₂, or CONR³;

[0287] each R⁵ is independently halogen, alkyl, —OR⁶, —N(R⁶)₂, —SR⁶, —SOR⁶, —SO₂R⁶, —CO₂R⁶, a fluorescent moiety, a radioisotope, or a therapeutic agent;

[0288] each R⁶ is independently —H, alkyl, alkenyl, alkynyl, arylalkyl, cycloalkylalkyl, heterocycloalkyl, a fluorescent moiety, a radioisotope, or a therapeutic agent;

[0289] R⁷ is —H, alkyl, alkenyl, alkynyl, arylalkyl, cycloalkyl, heteroalkyl, cycloalkylalkyl, heterocycloalkyl, aryl, or heteroaryl, each being optionally substituted with R⁵, or part of a cyclic structure with a D residue;

[0290] R⁸ is —H, alkyl, alkenyl, alkynyl, arylalkyl, cycloalkyl, heteroalkyl, cycloalkylalkyl, heterocycloalkyl, aryl, or heteroaryl, each being optionally substituted with R⁵, or part of a cyclic structure with an E residue;

[0291] each of Xaa¹ and Xaa² is independently an amino acid residue or absent;

[0292] Xaa³ is Ala, Aib, Asp, Asn, Cys, Glu, Gln, His, Ile, Lys, Leu, Met, Arg, Ser, Thr, Val, Trp, Tyr, or an analogue of any of the foregoing;

[0293] v is an integer from 1-1000;

[0294] w is an integer from 0-1000; and

[0295] n is 1, 2, 3, 4, or 5.

[0296] In some embodiments, the peptidomimetic macrocycle of Formula (V) comprises two crosslinks, wherein a first crosslink is of a first pair of amino acid residues, and a second crosslink is of a second pair of amino acid residues. In some embodiments, the first pair of amino acid residues and the second pair of amino acid residues do not share a common amino acid residue. In some embodiments, the first pair of amino acid residues and the second pair of amino acid residues share one common amino acid residue. In some embodiments, one of Xaa¹ and Xaa² is His. In some embodiments, both of Xaa¹ and Xaa² are His. In some embodiments, one of Xaa¹ and Xaa² is Arg. In some embodiments, both of Xaa¹ and Xaa² are Arg. In some embodiments, one of Xaa¹ and Xaa² is absent. In some embodiments, both of Xaa¹ and Xaa² are absent.

[0297] In some embodiments, the peptidomimetic macrocycle comprises a helix. In some embodiments, the peptidomimetic macrocycle comprises an α-helix. In some embodiments, v is 1, 2, 3, 4, 5, 6, 7, 8, 9, 10, 11, 12, 13, 14, or 15. In some embodiments, v is 3, 4, 5, 6, 7, 8, 9, or 10. In some embodiments, v is 8. In some embodiments, w is 0, 1, 2, 3, 4, 5, 6, 7, 8, 9, 10, 11, 12, 13, 14, or 15. In some embodiments, w is 0, 1, 2, 3, 4, or 5. In some embodiments, w is 0, 1, 2, or 3. In some embodiments, wherein w is 0.

[0298] In some embodiments, each v and w is independently 1, 2, 3, 4, 5, 6, 7, 8, 9, 10, 11, 12, 13, 14, 15, 16, 17, 18, 19, 20, 21, 22, 23, 24, 25, 26, 27, 28, 29, or 30. In some embodiments, w is an integer from 3-1000, for example 3-500, 3-200, 3-100, 3-50, 3-30, 3-20, or 3-10. In some embodiments, the sum of x+y+z is 3 or 6. In some embodiments, the sum of x+y+z is 3. In other embodiments, the sum of x+y+z is 6.

[0299] In some embodiments, w is 3, 4, 5, 6, 7, 8, 9, or 10, for example 3, 4, 5, or 6; 3, 4, 5, 6, 7, or 8; 6, 7, or 8; or 6, 7, 8, 9, or 10. In some embodiments, w is 3. In other embodiments, w is 6. In some embodiments, v is an integer from 1-1000, for example 1-500, 1-200, 1-100, 1-50, 1-30, 1-20, or 1-10. In some embodiments, v is 2.

[0300] In some embodiments, L is the formula -L¹-L²-, and L¹ and L² are independently alkylene, alkenylene, or alkynylene. In some embodiments, wherein L is the formula -L¹-L²-, and L¹ and L² are independently C₃-C₁₀ alkylene or C₃-C₁₀ alkenylene. In some embodiments, wherein L is the formula -L¹-L²-, and L¹ and L² are independently C₃-C₆ alkylene or C₃-C₆ alkenylene. In some embodiments, L is

[chemical structure]

In some embodiments, L is the formula -L¹-L²-L³-, and L¹ and L³ are independently alkylene, alkenylene, or alkynylene, and L² is arylene or heteroarylene. In some embodiments, L is the formula -L¹-L²-L³-, and L¹ and L³ are independently C₃-C₁₀ alkylene, and L² is heteroarylene. In some embodiments, L is the formula -L¹-L²-L³-, and L¹ and L³ are independently C₃-C₆ alkylene, and L² is heteroarylene.

[0301] In some embodiments, R¹ and R² are H. In some embodiments, R¹ and R² are independently alkyl. In some embodiments, R¹ and R² are methyl.

[0302] In some embodiments, the peptidomimetic macrocycle has the Formula (VI) (SEQ ID NO: 1785):

[chemical structure]

wherein:

[0303] each D and E is independently an amino acid residue;

[0304] R¹ and R² are independently —H, alkyl, alkenyl, alkynyl, arylalkyl, cycloalkyl, cycloalkylalkyl, heteroalkyl, or heterocycloalkyl, each being optionally substituted with halo-; or at least one of R¹ and R² forms a macrocycle-forming linker L′ connected to the alpha position of one of the D or E amino acid residues;

[0305] each L or L′ is independently a macrocycle-forming linker of the formula -L¹-L²- or -L¹-L²-L³-;

[0306] each L¹, L², and L³ is independently alkylene, alkenylene, alkynylene, heteroalkylene, cycloalkylene, heterocycloalkylene, arylene, heteroarylene, or [—R⁴—K—R⁴-]ₙ, each being optionally substituted with R⁵;

[0307] each R³ is independently —H, alkyl, alkenyl, alkynyl, arylalkyl, cycloalkyl, heteroalkyl, cycloalkylalkyl, heterocycloalkyl, aryl, or heteroaryl, each being optionally substituted with R⁵;

[0308] each R⁴ is independently alkylene, alkenylene, alkynylene, heteroalkylene, cycloalkylene, heterocycloalkylene, arylene, or heteroarylene, each being optionally substituted with R⁵;

[0309] each K is independently O, S, SO, SO₂, CO, CO₂, or CONR³;

[0310] each R⁵ is independently halogen, alkyl, —OR⁶, —N(R⁶)₂, —SR⁶, —SOR⁶, —SO₂R⁶, —CO₂R⁶, a fluorescent moiety, a radioisotope, or a therapeutic agent;

[0311] each R⁶ is independently —H, alkyl, alkenyl, alkynyl, arylalkyl, cycloalkylalkyl, heterocycloalkyl, a fluorescent moiety, a radioisotope, or a therapeutic agent;

[0312] R⁷ is —H, alkyl, alkenyl, alkynyl, arylalkyl, cycloalkyl, heteroalkyl, cycloalkylalkyl, heterocycloalkyl, aryl, or heteroaryl, each being optionally substituted with R⁵, or part of a cyclic structure with a D residue;

[0313] R⁸ is —H, alkyl, alkenyl, alkynyl, arylalkyl, cycloalkyl, heteroalkyl, cycloalkylalkyl, heterocycloalkyl, aryl, or heteroaryl, each being optionally substituted with R⁵, or part of a cyclic structure with an E residue;

[0314] each of Xaa¹ and Xaa² is independently an amino acid residue or absent;

[0315] v is an integer from 1-1000;

[0316] w is an integer from 0-1000; and

[0317] n is 1, 2, 3, 4, or 5.

[0318] In some embodiments, the peptidomimetic macrocycle of Formula (VI) comprises two crosslinks, wherein a first crosslink is of a first pair of amino acid residues, and a second crosslink is of a second pair of amino acid residues. In some embodiments, the first pair of amino acid residues and the second pair of amino acid residues do not share a common amino acid residue. In some embodiments, the first pair of amino acid residues and the second pair of amino acid residues share one common amino acid residue. In some embodiments, one of Xaa¹ and Xaa² is His. In some embodiments, both of Xaa¹ and Xaa² are His. In some embodiments, one of Xaa¹ and Xaa² is Arg. In some embodiments, both of Xaa¹ and Xaa² are Arg. In some embodiments, one of Xaa¹ and Xaa² is absent. In some embodiments, both of Xaa¹ and Xaa² are absent.

[0319] In some embodiments, the peptidomimetic macrocycle comprises a helix. In some embodiments, the peptidomimetic macrocycle comprises an α-helix. In some embodiments, v is 1, 2, 3, 4, 5, 6, 7, 8, 9, 10, 11, 12, 13, 14, or 15. In some embodiments, v is 3, 4, 5, 6, 7, 8, 9, or 10. In some embodiments, v is 8. In some embodiments, w is 0, 1, 2, 3, 4, 5, 6, 7, 8, 9, 10, 11, 12, 13, 14, or 15. In some embodiments, w is 0, 1, 2, 3, 4, or 5. In some embodiments, w is 0, 1, 2, or 3. In some embodiments, wherein w is 0.

[0320] In some embodiments, each v and w is independently 1, 2, 3, 4, 5, 6, 7, 8, 9, 10, 11, 12, 13, 14, 15, 16, 17, 18, 19, 20, 21, 22, 23, 24, 25, 26, 27, 28, 29, or 30. In some embodiments, w is an integer from 3-1000, for example 3-500, 3-200, 3-100, 3-50, 3-30, 3-20, or 3-10. In some embodiments, the sum of x+y+z is 3 or 6. In some embodiments, the sum of x+y+z is 3. In other embodiments, the sum of x+y+z is 6.

[0321] In some embodiments, w is 3, 4, 5, 6, 7, 8, 9, 10, for example 3, 4, 5, or 6; 3, 4, 5, 6, 7, or 8; 6, 7, or 8; or 6, 7, 8, 9, or 10. In some embodiments, w is 3. In other embodiments, w is 6. In some embodiments, v is an integer from 1-1000, for example 1-500, 1-200, 1-100, 1-50, 1-30, 1-20, or 1-10. In some embodiments, v is 2.

[0322] In some embodiments, L is the formula -L¹-L²-, and L¹ and L² are independently alkylene, alkenylene, or alkynylene. In some embodiments, wherein L is the formula -L¹-L²-, and L¹ and L² are independently C₃-C₁₀ alkylene or C₃-C₁₀ alkenylene. In some embodiments, wherein L is the formula -L¹-L²-, and L¹ and L² are independently C₃-C₆ alkylene or C₃-C₆ alkenylene. In some embodiments, L is

[chemical structure]

In some embodiments, L is the formula -L¹-L²-L³-, and L¹ and L³ are independently alkylene, alkenylene, or alkynylene, and L² is arylene or heteroarylene. In some embodiments, L is the formula -L¹-L²-L³-, and L¹ and L³ are independently C₃-C₁₀ alkylene, and L² is heteroarylene. In some embodiments, L is the formula -L¹-L²-L³-, and L¹ and L³ are independently C₃-C₆ alkylene, and L² is heteroarylene.

[0323] In some embodiments, R¹ and R² are H. In some embodiments, R¹ and R² are independently alkyl. In some embodiments, R¹ and R² are methyl.

[0324] In one example, at least one of R₁ and R₂ is alkyl, unsubstituted or substituted with halo-. In another example, both R₁ and R₂ are independently alkyl, unsubstituted or substituted with halo-. In some embodiments, at least one of R₁ and R₂ is methyl. In other embodiments, R₁ and R₂ are methyl.

[0325] In some embodiments of the invention, the sum of the sum of x+y+z is at least 3, or the sum of x′+y′+z′ is at least 3. In other embodiments of the invention, the sum of the sum of x+y+z is 1, 2, 3, 4, 5, 6, 7, 8, 9 or 10 (for example 2, 3 or 6) or the sum of x′+y′+z′ is 1, 2, 3, 4, 5, 6, 7, 8, 9 or 10 (for example 2, 3 or 6).

[0326] Each occurrence of A, B, C, D or E in a macrocycle or macrocycle precursor of the invention is independently selected. For example, a sequence represented by the formula [A]ₓ, when x is 3, encompasses embodiments where the amino acids are not identical, e.g. Gln-Asp-Ala as well as embodiments where the amino acids are identical, e.g. Gln-Gln-Gln. This applies for any value of x, y, or z in the indicated ranges. Similarly, when u is greater than 1, each compound of the invention may encompass peptidomimetic macrocycles which are the same or different. For example, a compound of the invention may comprise peptidomimetic macrocycles comprising different linker lengths or chemical compositions.

[0327] In some embodiments, the peptidomimetic macrocycle of the invention comprises a secondary structure which is an α-helix and R₈ is —H, allowing intrahelical hydrogen bonding. In some embodiments, at least one of A, B, C, D or E is an α,α-disubstituted amino acid. In one example, B is an α,α-disubstituted amino acid. For instance, at least one of A, B, C, D or E is 2-aminoisobutyric acid. In other embodiments, at least one of A, B, C, D or E is

[chemical structure]

[0328] In other embodiments, the length of the macrocycle-forming linker L as measured from a first Cα to a second Cα is selected to stabilize a desired secondary peptide structure, such as an α-helix formed by residues of the peptidomimetic macrocycle including, but not necessarily limited to, those between the first Cα to a second Cα.

[0329] In one embodiment, the peptidomimetic macrocycle of Formula (I) is:

[chemical structure]

wherein each R₁ and R₂ is independently —H, alkyl, alkenyl, alkynyl, arylalkyl, cycloalkyl, cycloalkylalkyl, heteroalkyl, or heterocycloalkyl, unsubstituted or substituted with halo-.

[0330] In related embodiments, the peptidomimetic macrocycle comprises a structure of Formula (I) which is:

[chemical structure]

[0331] In other embodiments, the peptidomimetic macrocycle of Formula (I) is a compound of any of the formulas shown below:

[chemical structure]

[chemical structure]

[chemical structure]

[chemical structure]

wherein “AA” represents any natural or non-natural amino acid side chain and “ [symbol] ” is [D]ᵥ, [E]_{w} as defined above, and n is an integer between 0 and 20, 50, 100, 200, 300, 400 or 500. In some embodiments, the substituent “n” shown in the preceding paragraph is 0. In other embodiments, the substituent “n” shown in the preceding paragraph is less than 50, 40, 30, 20, 10, or 5.

[0332] Exemplary embodiments of the macrocycle-forming linker L are shown below.

[chemical structure]

[0333] In other embodiments, D or E in the compound of Formula I are further modified in order to facilitate cellular uptake. In some embodiments, lipidating or PEGylating a peptidomimetic macrocycle facilitates cellular uptake, increases bioavailability, increases blood circulation, alters pharmacokinetics, decreases immunogenicity or decreases the needed frequency of administration.

[0334] In other embodiments, at least one of [D] and [E] in the compound of Formula I represents a moiety comprising an additional macrocycle-forming linker such that the peptidomimetic macrocycle comprises at least two macrocycle-forming linkers. In a specific embodiment, a peptidomimetic macrocycle comprises two macrocycle-forming linkers.

[0335] In the peptidomimetic macrocycles of the invention, any of the macrocycle-forming linkers described herein may be used in any combination with any of the sequences shown in Tables 1-2 and also with any of the R— substituents indicated herein.

[0336] In some embodiments, the peptidomimetic macrocycle comprises at least one α-helix motif. For example, A, B or C in the compound of Formula I include one or more α-helices. As a general matter, α-helices include between 3 and 4 amino acid residues per turn. In some embodiments, the α-helix of the peptidomimetic macrocycle includes 1 to 5 turns and, therefore, 3 to 20 amino acid residues. In specific embodiments, the α-helix includes 1 turn, 2 turns, 3 turns, 4 turns, or 5 turns. In some embodiments, the macrocycle-forming linker stabilizes an α-helix motif included within the peptidomimetic macrocycle. Thus, in some embodiments, the length of the macrocycle-forming linker L from a first Cα to a second Cα is selected to increase the stability of an α-helix. In some embodiments, the macrocycle-forming linker spans from 1 turn to 5 turns of the α-helix. In some embodiments, the macrocycle-forming linker spans approximately 1 turn, 2 turns, 3 turns, 4 turns, or 5 turns of the α-helix. In some embodiments, the length of the macrocycle-forming linker is approximately 5 Å to 9 Å per turn of the α-helix, or approximately 6 Å to 8 Å per turn of the α-helix. Where the macrocycle-forming linker spans approximately 1 turn of an α-helix, the length is equal to approximately 5 carbon-carbon bonds to 13 carbon-carbon bonds, approximately 7 carbon-carbon bonds to 11 carbon-carbon bonds, or approximately 9 carbon-carbon bonds. Where the macrocycle-forming linker spans approximately 2 turns of an α-helix, the length is equal to approximately 8 carbon-carbon bonds to 16 carbon-carbon bonds, approximately 10 carbon-carbon bonds to 14 carbon-carbon bonds, or approximately 12 carbon-carbon bonds. Where the macrocycle-forming linker spans approximately 3 turns of an α-helix, the length is equal to approximately 14 carbon-carbon bonds to 22 carbon-carbon bonds, approximately 16 carbon-carbon bonds to 20 carbon-carbon bonds, or approximately 18 carbon-carbon bonds. Where the macrocycle-forming linker spans approximately 4 turns of an α-helix, the length is equal to approximately 20 carbon-carbon bonds to 28 carbon-carbon bonds, approximately 22 carbon-carbon bonds to 26 carbon-carbon bonds, or approximately 24 carbon-carbon bonds. Where the macrocycle-forming linker spans approximately 5 turns of an α-helix, the length is equal to approximately 26 carbon-carbon bonds to 34 carbon-carbon bonds, approximately 28 carbon-carbon bonds to 32 carbon-carbon bonds, or approximately 30 carbon-carbon bonds. Where the macrocycle-forming linker spans approximately 1 turn of an α-helix, the linkage contains approximately 4 atoms to 12 atoms, approximately 6 atoms to 10 atoms, or approximately 8 atoms. Where the macrocycle-forming linker spans approximately 2 turns of the α-helix, the linkage contains approximately 7 atoms to 15 atoms, approximately 9 atoms to 13 atoms, or approximately 11 atoms. Where the macrocycle-forming linker spans approximately 3 turns of the α-helix, the linkage contains approximately 13 atoms to 21 atoms, approximately 15 atoms to 19 atoms, or approximately 17 atoms. Where the macrocycle-forming linker spans approximately 4 turns of the α-helix, the linkage contains approximately 19 atoms to 27 atoms, approximately 21 atoms to 25 atoms, or approximately 23 atoms. Where the macrocycle-forming linker spans approximately 5 turns of the α-helix, the linkage contains approximately 25 atoms to 33 atoms, approximately 27 atoms to 31 atoms, or approximately 29 atoms. Where the macrocycle-forming linker spans approximately 1 turn of the α-helix, the resulting macrocycle forms a ring containing approximately 17 members to 25 members, approximately 19 members to 23 members, or approximately 21 members. Where the macrocycle-forming linker spans approximately 2 turns of the α-helix, the resulting macrocycle forms a ring containing approximately 29 members to 37 members, approximately 31 members to 35 members, or approximately 33 members. Where the macrocycle-forming linker spans approximately 3 turns of the α-helix, the resulting macrocycle forms a ring containing approximately 44 members to 52 members, approximately 46 members to 50 members, or approximately 48 members. Where the macrocycle-forming linker spans approximately 4 turns of the α-helix, the resulting macrocycle forms a ring containing approximately 59 members to 67 members, approximately 61 members to 65 members, or approximately 63 members. Where the macrocycle-forming linker spans approximately 5 turns of the α-helix, the resulting macrocycle forms a ring containing approximately 74 members to 82 members, approximately 76 members to 80 members, or approximately 78 members.

[0337] In some embodiments, L is a macrocycle-forming linker of the formula:

[chemical structure]

[0338] Exemplary embodiments of such macrocycle-forming linkers L are shown below.

[chemical structure]

[chemical structure]

[chemical structure]

[chemical structure]

[chemical structure]

[chemical structure]

[chemical structure]

[chemical structure]

[chemical structure]

[chemical structure]

[chemical structure]

[0339] In some embodiments, the peptidomimetic macrocycle comprises an amino acid sequence of formula:

### X1-X2-X3-X4-X5-X6-X7-X8-X9-X10-X11-X12-X13-X14-X15-X16-X17-X18-X19-X20-X21

[0340] wherein:

[0341] In some embodiments, X1 is Ile, Arg, Ala, Lys, Pro, Leu, Asp, Glu, His, Ser, Gln, Phe, an analogue thereof, or absent.

[0342] In some embodiments, X2 is Trp, Arg, Ala, Asn, Phe, Pro, Leu, Ser, Lys, Tyr, His, Cou, Cou2, Cou4, Cou7, an analogue thereof, a crosslinked amino acid, or absent.

[0343] In some embodiments, X3 is Ile, Ala, Leu, Phe, Tyr, Val, Asp, Trp, Pro, Gln, Chg, Ac5c, Ac6c, Tba, Bip, Cha, Adm, hCha, an analogue thereof, or absent.

[0344] In some embodiments, X4 is Ala, Gln, Asp, Val, Gly, Ser, Leu, Phe, Cha, A4, an analogue, thereof, a crosslinked amino acid, or absent.

[0345] In some embodiments, X5 is Gln, Ala, Leu, Phe, Tyr, Gly, Ile, Val, Arg, Glu, Pro, Asp, MO, MO2, an analogue thereof, a crosslinked amino acid, or absent.

[0346] In some embodiments, X6 is Glu, Gln, His, Ala, Ser, Arg, Ile, Leu, Thr, Phe, Val, Tyr, Gly, Nle, St, an analogue thereof, or absent.

[0347] In some embodiments, X7 is Ala, Leu, Phe, Ile, 2Nal, 1Nal, 3cf, Chg, Cha, Adm, hCha, Igl, Bip, an analogue thereof, or absent.

[0348] In some embodiments, X8 is Arg, Ala, Asp, Glu, Thr, His, Gln, Gly, Asn, Phe, Cit, St, an analogue thereof, a crosslinked amino acid, or absent.

[0349] In some embodiments, X9 is Arg, Ala, Asp, Lys, Asn, Gly, Ser, Gln, Cys, Nle, St, an analogue thereof, or a crosslinked amino acid.

[0350] In some embodiments, X10 is Ile, Val, Ala, Asp, Asn, Phe, Tba, hL, hhL, Nle, Chg, Cha, an analogue thereof, or a crosslinked amino acid.

[0351] In some embodiments, X11 is Gly, Val, Ala, Leu, Ile, Asp, Glu, Cha, Aib, Abu, an analogue thereof, or a crosslinked amino acid.

[0352] In some embodiments, X12 is Asp, Ala, Asn, Gly, Arg, Glu, Lys, Leu, Nle, an analogue thereof, or a crosslinked amino acid.

[0353] In some embodiments, X13 is Ala, Glu, Gln, Leu, Lys, Asp, Tyr, Ile, Ser, Cys, St, Sta5, Aib, Nle, an analogue thereof, or a crosslinked amino acid.

[0354] In some embodiments, X14 is Phe, Ala, Leu, Val, Tyr, Glu, His, Ile, Nle, 1Nal, 2Nal, Chg, Cha, BiP, an analogue thereof, or a crosslinked amino acid.

[0355] In some embodiments, X15 is Asn, Gln, Ser, His, Glu, Asp, Ala, Leu, Ile, St, Nle, Aib, an analogue thereof, a crosslinked amino acid, or absent.

[0356] In some embodiments, X16 is Ala, Glu, Asp, Arg, Lys, Phe, Gly, Gln, Aib, Cha, St, an analogue thereof, a crosslinked amino acid, or absent.

[0357] In some embodiments, X17 is Phe, Tyr, Ala, Leu, Asn, Ser, Gln, Arg, His, Thr, Cou2, Cou3, Cou7, Dpr, Amf, Damf, Amye, an analogue thereof, a crosslinked amino acid, or absent.

[0358] In some embodiments, X18 is Tyr, Ala, Ile, Phe, His, Arg, Lys, Trp, Orn, Amf, Amye, Cha, 2Nal, an analogue thereof, or absent.

[0359] In some embodiments, X19 is Ala, Lys, Arg, His, Ser, Gln, Glu, Asp, Thr, Aib, Cha, an analogue thereof, a crosslinked amino acid, or absent.

[0360] In some embodiments, X20 is Arg, His, Ala, Thr, Lys, Amr, an analogue thereof, a crosslinked amino acid, or absent.

[0361] In some embodiments, X21 is Arg, His, Ala, Amr, an analogue thereof, or absent.

[0362] In some embodiments, the peptidomimetic macrocycle comprises a helix.

[0363] In some embodiments, the peptidomimetic macrocycle comprises an α-helix.

[0364] In some embodiments, the peptidomimetic macrocycle comprises an α,α-disubstituted amino acid.

[0365] In some embodiments, each amino acid connected by the macrocycle-forming linker is an α,α-disubstituted amino acid.

### Warhead-Containing Peptidomimetic Macrocycles

[0366] The binding sites of the target proteins can be populated with amino acids that are capable of covalent modification with suitable reactive ligands. In some embodiments, the peptidomimetic macrocycles of the invention contain at least one warhead that can covalently modify a target protein. Non-limiting examples of a target protein include Bfl-1 and Bcl-2 family proteins.

[0367] In some embodiments, amino acids that are capable of covalent modification with suitable reactive ligands can be located near or in the binding regions of the peptidomimetic macrocycles of the invention. Amino acids capable of covalent modification are amino acids with heteroatoms in the side chain, such as threonine, cysteine, histidine, serine, tyrosine, and lysine. Amino acids such as lysine are unreactive and do not react in vivo. In some embodiments, a hydrogen bond donor amino acid in proximity to a lysine moiety can enhance the nucleophilicity of the lysine nitrogen by lowering the pKa, and make lysine reactive toward an electrophilic warhead.

[0368] Amino acids with hydrogen donor capability include arginine, threonine, serine, histidine, tyrosine, and lysine. In some embodiments, hydrogen bond donation by a side chain or a main chain amide can enhance the electrophilicity of a warhead. The compounds of the invention can incorporate an amino acid warhead to be proximal to a lysine or cysteine amino acid of a target protein to facilitate the formation of a covalent bond and irreversibly inhibit the target protein.

[0369] In some embodiments, the warhead-containing peptidomimetic macrocycles of the invention are designed to be proximal to a Lys or Cys amino acid of the target protein to form a covalent bond for the irreversible inhibition of the target protein. In some embodiments, the warhead-containing peptidomimetic macrocycles of the invention act as irreversible inhibitors that covalently bind to their target proteins.

[0370] In some embodiments, the warhead-containing peptidomimetic macrocycles of the invention can permanently eliminate existing drug target activity, which can return when the target protein is newly synthesized. In some embodiments, the therapeutic plasma concentration of a compound can irreversibly suppress the activity of a target protein. In some embodiments, the plasma levels of a target protein can decline while the target protein remains inactivated. In some embodiments, the warhead-containing peptidomimetic macrocycles of the invention can lower the minimal blood plasma concentration required for therapeutic activity. In some embodiments, the warhead-containing peptidomimetic macrocycles of the invention can minimize dosing requirements. In some embodiments, the warhead-containing peptidomimetic macrocycles of the invention can eliminate the requirement for long plasma-half lives. In some embodiments, the warhead-containing peptidomimetic macrocycles of the invention can reduce toxicity resulting from any nonspecific off-target interactions that can occur at high or prolonged blood plasma levels.

[0371] In some embodiments, the warhead-containing peptidomimetic macrocycles of the invention can inactivate target proteins that have resistance mutations. In some embodiments, the warhead-containing peptidomimetic macrocycles of the invention can have enhanced potency, which may lower the dose of inhibitor required to silence the target protein.

[0372] In some embodiments, the peptidomimetic macrocycles of the invention comprise at least one warhead. In some embodiments, the warhead-containing peptidomimetic macrocycles of the invention comprise an amino acid sequence that is about 60%, about 70%, about 80%, about 90%, about 95%, and about 99% identical to an amino acid sequence identified as binding to the binding site of a target protein.

[0373] In some embodiments, the warhead-containing peptidomimetic macrocycles of the invention are of the formula:

[chemical structure]

wherein:

[0374] each A, C, D, and E is independently a natural or non-natural amino acid;

[0375] each B is independently a natural or non-natural amino acid, amino acid analogue,

[chemical structure]

[—NH-L₃-CO—], [—NH-L₃-SO₂—], or [—NH-L₃-];

[0376] each L is independently a macrocycle-forming linker;

[0377] each L′ is independently alkylene, alkenylene, alkynylene, heteroalkylene, cycloalkylene, heterocycloalkylene, arylene, or heteroarylene, each being optionally substituted with R₅, or a bond, or together with R₁ and the atom to which both R₁ and L′ are bound forms a ring;

[0378] each L″ is independently alkylene, alkenylene, alkynylene, heteroalkylene, cycloalkylene, heterocycloalkylene, arylene, or heteroarylene, each being optionally substituted with R₅, or a bond, or together with R₂ and the atom to which both R₂ and L″ are bound forms a ring;

[0379] each R₁ is independently-H, alkyl, alkenyl, alkynyl, arylalkyl, cycloalkyl, cycloalkylalkyl, heteroalkyl, or heterocycloalkyl, each being optionally substituted with halo-, or together with L′ and the atom to which both R₁ and L′ are bound forms a ring;

[0380] each R₂ is independently-H, alkyl, alkenyl, alkynyl, arylalkyl, cycloalkyl, cycloalkylalkyl, heteroalkyl, or heterocycloalkyl, each being optionally substituted with halo-, or together with L″ and the atom to which both R₂ and L″ are bound forms a ring;

[0381] each R₃ is independently —H, alkyl, alkenyl, alkynyl, arylalkyl, heteroalkyl, cycloalkyl, heterocycloalkyl, cycloalkylalkyl, aryl, or heteroaryl, each being optionally substituted with R₅;

[0382] each L₃ is independently alkylene, alkenylene, alkynylene, heteroalkylene, cycloalkylene, heterocycloalkylene, arylene, heteroarylene, or [—R₄—K—R₄-]ₙ, each being optionally substituted with R₅;

[0383] each R₄ is independently alkylene, alkenylene, alkynylene, heteroalkylene, cycloalkylene, heterocycloalkylene, arylene, or heteroarylene;

[0384] each K is independently O, S, SO, SO₂, CO, CO₂, or CONR₃;

[0385] each n is independently 1, 2, 3, 4, or 5;

[0386] each R₅ is independently halogen, alkyl, —OR₆, —N(R₆)₂, —SR₆, —SOR₆, —SO₂R₆, —CO₂R₆, a fluorescent moiety, a radioisotope, or a therapeutic agent;

[0387] each R₆ is independently —H, alkyl, alkenyl, alkynyl, arylalkyl, cycloalkylalkyl, heterocycloalkyl, a fluorescent moiety, a radioisotope, or a therapeutic agent;

[0388] each R₇ is independently —H, alkyl, alkenyl, alkynyl, arylalkyl, cycloalkyl, heteroalkyl, cycloalkylalkyl, heterocycloalkyl, aryl, or heteroaryl, each being optionally substituted with R₅, or part of a cyclic structure with a D residue;

[0389] each R₈ is independently —H, alkyl, alkenyl, alkynyl, arylalkyl, cycloalkyl, heteroalkyl, cycloalkylalkyl, heterocycloalkyl, aryl, or heteroaryl, each being optionally substituted with R₅, or part of a cyclic structure with an E residue;

[0390] each v and w is independently an integer from 1-1000;

[0391] u is 1, 2, 3, 4, 5, 6, 7, 8, 9, or 10; and

[0392] each x, y and z is independently 0, 1, 2, 3, 4, 5, 6, 7, 8, 9, or 10, or

a pharmaceutically-acceptable salt thereof, wherein the peptidomimetic macrocycle comprises an amino acid with an electron accepting group susceptible to attack by a nucleophile.

[0393] In some embodiments, the warhead-containing peptidomimetic macrocycles of the invention are of the formula:

[chemical structure]

wherein:

[0394] each A, C, D, E, and F is independently a natural or non-natural amino acid;

[0395] each B is independently a natural or non-natural amino acid, amino acid analogue,

[chemical structure]

[—NH-L₃-CO—], [—NH-L₃-SO₂—], or [—NH-L₃-];

[0396] each WH is an amino acid with an electron accepting group susceptible to attack by a nucleophile;

[0397] each L is independently a macrocycle-forming linker;

[0398] each L′ is independently alkylene, alkenylene, alkynylene, heteroalkylene, cycloalkylene, heterocycloalkylene, arylene, or heteroarylene, each being optionally substituted with R₅, or a bond, or together with R₁ and the atom to which both R₁ and L′ are bound forms a ring;

[0399] each L″ is independently alkylene, alkenylene, alkynylene, heteroalkylene, cycloalkylene, heterocycloalkylene, arylene, or heteroarylene, each being optionally substituted with R₅, or a bond, or together with R₂ and the atom to which both R₂ and L″ are bound forms a ring;

[0400] each R₁ is independently-H, alkyl, alkenyl, alkynyl, arylalkyl, cycloalkyl, cycloalkylalkyl, heteroalkyl, or heterocycloalkyl, each being optionally substituted with halo-, or together with L′ and the atom to which both R₁ and L′ are bound forms a ring;

[0401] each R₂ is independently-H, alkyl, alkenyl, alkynyl, arylalkyl, cycloalkyl, cycloalkylalkyl, heteroalkyl, or heterocycloalkyl, each being optionally substituted with halo-, or together with L″ and the atom to which both R₂ and L″ are bound forms a ring;

[0402] each R₃ is independently —H, alkyl, alkenyl, alkynyl, arylalkyl, heteroalkyl, cycloalkyl, heterocycloalkyl, cycloalkylalkyl, aryl, or heteroaryl, each being optionally substituted with R₅;

[0403] each L₃ is independently alkylene, alkenylene, alkynylene, heteroalkylene, cycloalkylene, heterocycloalkylene, arylene, heteroarylene, or [—R₄—K—R₄-]ₙ, each being optionally substituted with R₅;

[0404] each R₄ is independently alkylene, alkenylene, alkynylene, heteroalkylene, cycloalkylene, heterocycloalkylene, arylene, or heteroarylene;

[0405] each K is independently O, S, SO, SO₂, CO, CO₂, or CONR₃;

[0406] each n is independently 1, 2, 3, 4, or 5;

[0407] each R₅ is independently halogen, alkyl, —OR₆, —N(R₆)₂, —SR₆, —SOR₆, —SO₂R₆, —CO₂R₆, a fluorescent moiety, a radioisotope, or a therapeutic agent;

[0408] each R₆ is independently —H, alkyl, alkenyl, alkynyl, arylalkyl, cycloalkylalkyl, heterocycloalkyl, a fluorescent moiety, a radioisotope, or a therapeutic agent;

[0409] each R₇ is independently —H, alkyl, alkenyl, alkynyl, arylalkyl, cycloalkyl, heteroalkyl, cycloalkylalkyl, heterocycloalkyl, aryl, or heteroaryl, each being optionally substituted with R₅, or part of a cyclic structure with a D residue;

[0410] each R₈ is independently —H, alkyl, alkenyl, alkynyl, arylalkyl, cycloalkyl, heteroalkyl, cycloalkylalkyl, heterocycloalkyl, aryl, or heteroaryl, each being optionally substituted with R₅, or part of a cyclic structure with an E residue;

[0411] each v and w is independently an integer from 1-1000;

[0412] t is 0, 1, 2, 3, 4, 5, 6, 7, 8, 9, or 10;

[0413] u is 1, 2, 3, 4, 5, 6, 7, 8, 9, or 10; and

[0414] each x, y and z is independently 0, 1, 2, 3, 4, 5, 6, 7, 8, 9, or 10, or

a pharmaceutically-acceptable salt thereof.

[0415] In some embodiments, t is 0, 1, or 2. In some embodiments, t is 0. In some embodiments, u is 1 or 2. In some embodiments, t is 0, and u is 1.

[0416] In some embodiments, the warhead (WH)-containing peptidomimetic macrocycles of the invention are of the formula:

[chemical structure]

[0417] In some embodiments, the warhead-containing peptidomimetic macrocycles are of the formula:

[chemical structure]

[0418] In some embodiments, the warhead-containing peptidomimetic macrocycles of the invention comprise an amino acid of the formula:

[chemical structure]

In some embodiments, the warhead of the amino acids are of the formula:

[chemical structure]

wherein:
[0419] X is alkylene, CH, CH₂, NR^{α}, O, or S, wherein R^{α} is —H, alkyl, alkenyl, alkynyl, arylalkyl, cycloalkyl, heteroalkyl, cycloalkylalkyl, heterocycloalkyl, cycloaryl, or heterocycloaryl;
[0420] R^{α} is H, CN, or C(O)CH₃;
[0421] R^{b} is H, methyl, ethyl, allyl, propyl, isopropyl, butyl, or isobutyl;
[0422] each R^{c}, R^{d}, and R^{e} is independently —H, C₁-C₄ saturated or unsaturated, straight or branched, hydrocarbon chain, or an electron-withdrawing group, and in some embodiments, at least one of R^{c}, R^{d}, and R^{e} is an electron withdrawing group;
[0423] R^{f} is halogen, a C₂ alkynyl or alkenyl side chain optionally substituted with oxo, halogen, NO₂, or CN; and
[0424] n′ iso, 1, 2, 3, 4, or 5.

[0425] In some embodiments, R^{d} and R^{e} are each independently —H, methyl, ethyl, allyl, propyl, isopropyl, butyl, or isobutyl. In some embodiments, R^{f} is —CH═CH₂ or —C≡CH.

[0426] In some embodiments, the warhead-containing peptidomimetic macrocycles of the formula comprise an amino acid with the side chain:

[chemical structure]

[0427] In some embodiments, the peptidomimetic macrocycles of the invention comprise SEQ ID NOs: 1-1625 and one Michael acceptor. In some embodiments, the peptidomimetic macrocycles of the invention comprise SEQ ID NOs: 1-500 and one Michael acceptor. In some embodiments, the peptidomimetic macrocycles of the invention comprise SEQ ID NOs: 1-10 and one Michael acceptor. In some embodiments, the peptidomimetic macrocycles of the invention comprise SEQ ID NOs: 1500-1625 and one Michael acceptor. In some embodiments, the peptidomimetic macrocycles of the invention comprise SEQ ID NOs: 1575-1625 and one Michael acceptor. In some embodiments, the peptidomimetic macrocycles of the invention comprise SEQ ID NOs: 1620-1625 and one Michael acceptor.

[0428] In some embodiments, the peptidomimetic macrocycles of the invention comprise SEQ ID NOs: 1-1625 and

[chemical structure]

as a Michael acceptor. In some embodiments, the peptidomimetic macrocycles of the invention comprise SEQ ID NOs: 1575-1625 and

[chemical structure]

as a Michael acceptor. In some embodiments, the peptidomimetic macrocycles of the invention comprise SEQ ID NOs: 1-50 or 1620-1625 and

[chemical structure]

as a Michael acceptor. In some embodiments, the peptidomimetic macrocycles of the invention comprise SEQ ID NO 2 with

[chemical structure]

as a Michael acceptor. In some embodiments, the peptidomimetic macrocycles of the invention comprise SEQ ID NO 15 with

[chemical structure]

as a Michael acceptor. In some embodiments, the peptidomimetic macrocycles of the invention comprise SEQ ID NO 1620 with

[chemical structure]

as a Michael acceptor. In some embodiments, the peptidomimetic macrocycles of the invention comprise SEQ ID NO 1621 with

[chemical structure]

as a Michael acceptor. In some embodiments, the peptidomimetic macrocycles of the invention comprise SEQ ID NO 1625 with

[chemical structure]

as a Michael acceptor.

[0429] Non-limiting examples of warhead-containing peptidomimetic macrocycles include:

### [WH]IAQELR$IGD$FNAYYARR-NH₂ (SEQ ID NO: 1626) and

### [WH]IAQALR$r8hLGDAFN$YF4FA-NH₂(SEQ ID NO: 1627).

### Preparation of Peptidomimetic Macrocycles

[0430] Peptidomimetic macrocycles of the invention may be prepared by any of a variety of methods known in the art. For example, any of the residues indicated by “X”, “Z” or “XX” in Tables for 2 may be substituted with a residue capable of forming a crosslinker with a second residue in the same molecule or a precursor of such a residue.

[0431] Various methods to effect formation of peptidomimetic macrocycles are known in the art. For example, the preparation of peptidomimetic macrocycles of Formula I is described in Schafmeister et al., J. Am. Chem. Soc. 122:5891-5892 (2000); Schafmeister & Verdin, J. Am. Chem. Soc. 122:5891 (2005); Walensky et al., Science 305:1466-1470 (2004); U.S. Pat. No. 7,192,713 and PCT application WO 2008/121767. The α,α-disubstituted amino acids and amino acid precursors disclosed in the cited references may be employed in synthesis of the peptidomimetic macrocycle precursor polypeptides. For example, the “55-olefin amino acid” is (S)-α-(2′-pentenyl) alanine and the “R8 olefin amino acid” is (R)-α-(2′-octenyl) alanine. Following incorporation of such amino acids into precursor polypeptides, the terminal olefins are reacted with a metathesis catalyst, leading to the formation of the peptidomimetic macrocycle. In various embodiments, the following amino acids may be employed in the synthesis of the peptidomimetic macrocycle:

[chemical structure]

[0432] In some embodiments, x+y+z is 3, and A, B and C are independently natural or non-natural amino acids. In other embodiments, x+y+z is 6, and A, B and C are independently natural or non-natural amino acids.

[0433] In some embodiments, the contacting step is performed in a solvent selected from the group consisting of protic solvent, aqueous solvent, organic solvent, and mixtures thereof. For example, the solvent may be chosen from the group consisting of H₂O, THF, THF/H₂O, tBuOH/H₂O, DMF, DIPEA, CH₃CN or CH₂Cl₂, ClCH₂CH₂Cl or a mixture thereof. The solvent may be a solvent which favors helix formation.

[0434] Alternative but equivalent protecting groups, leaving groups or reagents are substituted, and certain of the synthetic steps are performed in alternative sequences or orders to produce the desired compounds. Synthetic chemistry transformations and protecting group methodologies (protection and deprotection) useful in synthesizing the compounds described herein include, for example, those such as described in Larock, Comprehensive Organic Transformations, VCH Publishers (1989); Greene and Wuts, Protective Groups in Organic Synthesis, 2d. Ed., John Wiley and Sons (1991); Fieser and Fieser, Fieser and Fieser's Reagents for Organic Synthesis, John Wiley and Sons (1994); and Paquette, ed., Encyclopedia of Reagents for Organic Synthesis, John Wiley and Sons (1995), and subsequent editions thereof.

[0435] The peptidomimetic macrocycles disclosed herein are made, for example, by chemical synthesis methods, such as described in Fields et al., Chapter 3 in Synthetic Peptides: A User's Guide, ed. Grant, W. H. Freeman & Co., New York, N.Y., 1992, p. 77. Hence, for example, peptides are synthesized using the automated Merrifield techniques of solid phase synthesis with the amine protected by either tBoc or Fmoc chemistry using side chain protected amino acids on, for example, an automated peptide synthesizer (e.g., Applied Biosystems (Foster City, Calif.), Model 430A, 431, or 433).

[0436] One manner of producing the peptidomimetic precursors and peptidomimetic macrocycles described herein uses solid phase peptide synthesis (SPPS). The C-terminal amino acid is attached to a cross-linked polystyrene resin via an acid labile bond with a linker molecule. This resin is insoluble in the solvents used for synthesis, making it relatively simple and fast to wash away excess reagents and by-products. The N-terminus is protected with the Fmoc group, which is stable in acid, but removable by base. Side chain functional groups are protected as necessary with base stable, acid labile groups.

[0437] Longer peptidomimetic precursors are produced, for example, by conjoining individual synthetic peptides using native chemical ligation. Alternatively, the longer synthetic peptides are biosynthesized by well-known recombinant DNA and protein expression techniques. Such techniques are provided in well-known standard manuals with detailed protocols. To construct a gene encoding a peptidomimetic precursor of this invention, the amino acid sequence is reverse translated to obtain a nucleic acid sequence encoding the amino acid sequence, preferably with codons that are optimum for the organism in which the gene is to be expressed. Next, a synthetic gene is made, typically by synthesizing oligonucleotides which encode the peptide and any regulatory elements, if necessary. The synthetic gene is inserted in a suitable cloning vector and transfected into a host cell. The peptide is then expressed under suitable conditions appropriate for the selected expression system and host. The peptide is purified and characterized by standard methods.

[0438] The peptidomimetic precursors are made, for example, in a high-throughput, combinatorial fashion using, for example, a high-throughput polychannel combinatorial synthesizer (e.g., Thuramed TETRAS multichannel peptide synthesizer from CreoSalus, Louisville, Ky. or Model Apex 396 multichannel peptide synthesizer from AAPPTEC, Inc., Louisville, Ky.).

[0439] In some embodiments, the peptidomimetic macrocycles of the invention comprise triazole macrocycle-forming linkers. For example, the synthesis of such peptidomimetic macrocycles involves a multi-step process that features the synthesis of a peptidomimetic precursor containing an azide moiety and an alkyne moiety; followed by contacting the peptidomimetic precursor with a macrocyclization reagent to generate a triazole-linked peptidomimetic macrocycle. Such a process is described, for example, in U.S. application Ser. No. 12/037,041, filed on Feb. 25, 2008. Macrocycles or macrocycle precursors are synthesized, for example, by solution phase or solid-phase methods, and can contain both naturally-occurring and non-naturally-occurring amino acids. See, for example, Hunt, “The Non-Protein Amino Acids” in Chemistry and Biochemistry of the Amino Acids, edited by G. C. Barrett, Chapman and Hall, 1985.

[0440] In some embodiments, an azide is linked to the α-carbon of a residue and an alkyne is attached to the α-carbon of another residue. In some embodiments, the azide moieties are azido-analogues of amino acids L-lysine, D-lysine, alpha-methyl-L-lysine, alpha-methyl-D-lysine, L-ornithine, D-ornithine, alpha-methyl-L-ornithine or alpha-methyl-D-ornithine. In another embodiment, the alkyne moiety is L-propargylglycine. In yet other embodiments, the alkyne moiety is an amino acid selected from the group consisting of L-propargylglycine, D-propargylglycine, (S)-2-amino-2-methyl-4-pentynoic acid, (R)-2-amino-2-methyl-4-pentynoic acid, (S)-2-amino-2-methyl-5-hexynoic acid, (R)-2-amino-2-methyl-5-hexynoic acid, (S)-2-amino-2-methyl-6-heptynoic acid, (R)-2-amino-2-methyl-6-heptynoic acid, (S)-2-amino-2-methyl-7-octynoic acid, (R)-2-amino-2-methyl-7-octynoic acid, (S)-2-amino-2-methyl-8-nonynoic acid and (R)-2-amino-2-methyl-8-nonynoic acid.

[0441] The following synthetic schemes are provided solely to illustrate the present invention and are not intended to limit the scope of the invention, as described herein. To simplify the drawings, the illustrative schemes depict azido amino acid analogues ε-azido-α-methyl-L-lysine and ε-azido-α-methyl-D-lysine, and alkyne amino acid analogues L-propargylglycine, (S)-2-amino-2-methyl-4-pentynoic acid, and (S)-2-amino-2-methyl-6-heptynoic acid. Thus, in the following synthetic schemes, each R₁, R₂, R₇ and R₈ is —H; each L₁ is —(CH₂)₄—; and each L₂ is —(CH₂)—. However, as noted throughout the detailed description above, many other amino acid analogues can be employed in which R₁, R₂, R₇, R₈, L₁ and L₂ can be independently selected from the various structures disclosed herein.

[chemical structure]

[chemical structure]

[chemical structure]

[0442] Synthetic Scheme 1 describes the preparation of several compounds of the invention. Ni(II) complexes of Schiff bases derived from the chiral auxiliary (S)-2-[N—(N′-benzylprolyl)amino]benzophenone (BPB) and amino acids such as glycine or alanine are prepared as described in Belokon et al. (1998), Tetrahedron Asymm. 9:4249-4252. The resulting complexes are subsequently reacted with alkylating reagents comprising an azido or alkynyl moiety to yield enantiomerically enriched compounds of the invention. If desired, the resulting compounds can be protected for use in peptide synthesis.

[chemical structure]

[0443] In the general method for the synthesis of peptidomimetic macrocycles shown in Synthetic Scheme 2, the peptidomimetic precursor contains an azide moiety and an alkyne moiety and is synthesized by solution-phase or solid-phase peptide synthesis (SPPS) using the commercially available amino acid N-α-Fmoc-L-propargylglycine and the N-α-Fmoc-protected forms of the amino acids (S)-2-amino-2-methyl-4-pentynoic acid, (S)-2-amino-6-heptynoic acid, (S)-2-amino-2-methyl-6-heptynoic acid, N-methyl-ε-azido-L-lysine, and N-methyl-ε-azido-D-lysine. The peptidomimetic precursor is then deprotected and cleaved from the solid-phase resin by standard conditions (e.g., strong acid such as 95% TFA). The peptidomimetic precursor is reacted as a crude mixture or is purified prior to reaction with a macrocyclization reagent such as a Cu(I) in organic or aqueous solutions (Rostovtsev et al. (2002), Angew. Chem. Int. Ed. 41:2596-2599; Tornoe et al. (2002), J. Org. Chem. 67:3057-3064; Deiters et al. (2003), J. Am. Chem. Soc. 125:11782-11783; Punna et al. (2005), Angew. Chem. Int. Ed. 44:2215-2220). In one embodiment, the triazole forming reaction is performed under conditions that favor α-helix formation. In one embodiment, the macrocyclization step is performed in a solvent chosen from the group consisting of H₂O, THF, CH₃CN, DMF, DIPEA, tBuOH or a mixture thereof. In another embodiment, the macrocyclization step is performed in DMF. In some embodiments, the macrocyclization step is performed in a buffered aqueous or partially aqueous solvent.

[chemical structure]

[0444] In the general method for the synthesis of peptidomimetic macrocycles shown in Synthetic Scheme 3, the peptidomimetic precursor contains an azide moiety and an alkyne moiety and is synthesized by solid-phase peptide synthesis (SPPS) using the commercially available amino acid N-α-Fmoc-L-propargylglycine and the N-α-Fmoc-protected forms of the amino acids (S)-2-amino-2-methyl-4-pentynoic acid, (S)-2-amino-6-heptynoic acid, (S)-2-amino-2-methyl-6-heptynoic acid, N-methyl-ε-azido-L-lysine, and N-methyl-ε-azido-D-lysine. The peptidomimetic precursor is reacted with a macrocyclization reagent such as a Cu(I) reagent on the resin as a crude mixture (Rostovtsev et al. (2002), Angew. Chem. Int. Ed. 41:2596-2599; Tornoe et al. (2002), J. Org. Chem. 67:3057-3064; Deiters et al. (2003), J. Am. Chem. Soc. 125:11782-11783; Punna et al. (2005), Angew. Chem. Int. Ed. 44:2215-2220). The resultant triazole-containing peptidomimetic macrocycle is then deprotected and cleaved from the solid-phase resin by standard conditions (e.g., strong acid such as 95% TFA). In some embodiments, the macrocyclization step is performed in a solvent chosen from the group consisting of CH₂Cl₂, ClCH₂CH₂Cl, DMF, THF, NMP, DIPEA, 2,6-lutidine, pyridine, DMSO, H₂O or a mixture thereof. In some embodiments, the macrocyclization step is performed in a buffered aqueous or partially aqueous solvent.

[chemical structure]

[0445] In the general method for the synthesis of peptidomimetic macrocycles shown in Synthetic Scheme 4, the peptidomimetic precursor contains an azide moiety and an alkyne moiety and is synthesized by solution-phase or solid-phase peptide synthesis (SPPS) using the commercially available amino acid N-α-Fmoc-L-propargylglycine and the N-α-Fmoc-protected forms of the amino acids (S)-2-amino-2-methyl-4-pentynoic acid, (S)-2-amino-6-heptynoic acid, (S)-2-amino-2-methyl-6-heptynoic acid, N-methyl-ε-azido-L-lysine, and N-methyl-ε-azido-D-lysine. The peptidomimetic precursor is then deprotected and cleaved from the solid-phase resin by standard conditions (e.g., strong acid such as 95% TFA). The peptidomimetic precursor is reacted as a crude mixture or is purified prior to reaction with a macrocyclization reagent such as a Ru(II) reagents, for example Cp*RuCl(PPh₃)₂ or [Cp*RuCl]₄ (Rasmussen et al. (2007), Org. Lett. 9:5337-5339; Zhang et al. (2005), J. Am. Chem. Soc. 127:15998-15999). In some embodiments, the macrocyclization step is performed in a solvent chosen from the group consisting of DMF, CH₃CN and THF.

[chemical structure]

[0446] In the general method for the synthesis of peptidomimetic macrocycles shown in Synthetic Scheme 5, the peptidomimetic precursor contains an azide moiety and an alkyne moiety and is synthesized by solid-phase peptide synthesis (SPPS) using the commercially available amino acid N-α-Fmoc-L-propargylglycine and the N-α-Fmoc-protected forms of the amino acids (S)-2-amino-2-methyl-4-pentynoic acid, (S)-2-amino-6-heptynoic acid, (S)-2-amino-2-methyl-6-heptynoic acid, N-methyl-ε-azido-L-lysine, and N-methyl-ε-azido-D-lysine. The peptidomimetic precursor is reacted with a macrocyclization reagent such as a Ru(II) reagent on the resin as a crude mixture. For example, the reagent can be Cp*RuCl(PPh₃)₂ or [Cp*RuCl]₄ (Rasmussen et al. (2007), Org. Lett. 9:5337-5339; Zhang et al. (2005), J. Am. Chem. Soc. 127:15998-15999). In some embodiments, the macrocyclization step is performed in a solvent chosen from the group consisting of CH₂Cl₂, ClCH₂CH₂Cl, CH₃CN, DMF, and THF.

[0447] In some embodiments, a peptidomimetic macrocycle of Formula I comprises a halogen group substitution on a triazole moiety, for example an iodo substitution. Such peptidomimetic macrocycles may be prepared from a precursor having the partial structure and using the cross-linking methods taught herein. Crosslinkers of any length, as described herein, may be prepared comprising such substitutions. In one embodiment, the peptidomimetic macrocycle is prepared according to the scheme shown below. The reaction is performed, for example, in the presence of CuI and an amine ligand such as TEA or TTTA. See, e.g., Hein et al. Angew. Chem., Int. Ed. 2009, 48, 8018-8021.

[chemical structure]

[0448] In other embodiments, an iodo-substituted triazole is generated according to the scheme shown below. For example, the second step in the reaction scheme below is performed using, for example, CuI and N-bromosuccinimide (NBS) in the presence of THF (see, e.g. Zhang et al., J. Org. Chem. 2008, 73, 3630-3633). In other embodiments, the second step in the reaction scheme shown below is performed, for example, using CuI and an iodinating agent such as ICl (see, e.g. Wu et al., Synthesis 2005, 1314-1318.)

[chemical structure]

[0449] In some embodiments, an iodo-substituted triazole moiety is used in a cross-coupling reaction, such as a Suzuki or Sonogashira coupling, to afford a peptidomimetic macrocycle comprising a substituted crosslinker. Sonogashira couplings using an alkyne as shown below may be performed, for example, in the presence of a palladium catalyst such as Pd(PPh₃)₂Cl₂, CuI, and in the presence of a base such as triethylamine. Suzuki couplings using an arylboronic or substituted alkenyl boronic acid as shown below may be performed, for example, in the presence of a catalyst such as Pd(PPh₃)₄, and in the presence of a base such as K₂CO₃.

[chemical structure]

[0450] Any suitable triazole substituent groups which reacts with the iodo-substituted triazole can be used in Suzuki couplings described herein. Example triazole substituents for use in Suzuki couplings are shown below:

[chemical structure]

wherein “Cyc” is a suitable aryl, cycloalkyl, cycloalkenyl, heteroaryl, or heterocyclyl group, unsubstituted or optionally substituted with an Rₐ or R_{b} group as described below.

[0451] In some embodiments, the substituent is:

[chemical structure]

[0452] Any suitable substituent group which reacts with the iodo-substituted triazole can be used in Sonogashira couplings described herein. Example triazole substituents for use in Sonogashira couplings are shown below:

[chemical structure]

wherein “Cyc” is a suitable aryl, cycloalkyl, cycloalkenyl, heteroaryl, or heterocyclyl group, unsubstituted or optionally substituted with an Rₐ or R_{b} group as described below.

[0453] In some embodiments, the triazole substituent is:

[chemical structure]

[0454] In some embodiments, the Cyc group shown above is further substituted by at least one Rₐ or R_{b} substituent. In some embodiments, at least one of Rₐ and R_{b} is independently:

[chemical structure]

[0455] In other embodiments, the triazole substituent is

[chemical structure]

and at least one of Rₐ and R_{b} is alkyl (including hydrogen, methyl, or ethyl), or:

[chemical structure]

The present invention contemplates the use of non-naturally-occurring amino acids and

[0456] The present invention contemplates the use of non-naturally-occurring amino acids and amino acid analogues in the synthesis of the peptidomimetic macrocycles described herein. Any amino acid or amino acid analogue amenable to the synthetic methods employed for the synthesis of stable triazole containing peptidomimetic macrocycles can be used in the present invention. For example, L-propargylglycine is contemplated as a useful amino acid in the present invention. However, other alkyne-containing amino acids that contain a different amino acid side chain are also useful in the invention. For example, L-propargylglycine contains one methylene unit between the α-carbon of the amino acid and the alkyne of the amino acid side chain. The invention also contemplates the use of amino acids with multiple methylene units between the α-carbon and the alkyne. Also, the azido-analogues of amino acids L-lysine, D-lysine, alpha-methyl-L-lysine, and alpha-methyl-D-lysine are contemplated as useful amino acids in the present invention. However, other terminal azide amino acids that contain a different amino acid side chain are also useful in the invention. For example, the azido-analogue of L-lysine contains four methylene units between the α-carbon of the amino acid and the terminal azide of the amino acid side chain. The invention also contemplates the use of amino acids with fewer than or greater than four methylene units between the α-carbon and the terminal azide. Table 2 shows some amino acids useful in the preparation of peptidomimetic macrocycles disclosed herein.

TABLE 2

[chemical structure]

[chemical structure]

[chemical structure]

[chemical structure]

[chemical structure]

[chemical structure]

[chemical structure]

[chemical structure]

[chemical structure]

[chemical structure]

[chemical structure]

[chemical structure]

[chemical structure]

[chemical structure]

[chemical structure]

[chemical structure]

[chemical structure]

[chemical structure]

[chemical structure]

[chemical structure]

[0457] In some embodiments the amino acids and amino acid analogues are of the D-configuration. In other embodiments they are of the L-configuration. In some embodiments, some of the amino acids and amino acid analogues contained in the peptidomimetic are of the D-configuration while some of the amino acids and amino acid analogues are of the L-configuration. In some embodiments the amino acid analogues are α,α-disubstituted, such as α-methyl-L-propargylglycine, α-methyl-D-propargylglycine, ε-azido-alpha-methyl-L-lysine, and ε-azido-alpha-methyl-D-lysine. In some embodiments the amino acid analogues are N-alkylated, e.g., N-methyl-L-propargylglycine, N-methyl-D-propargylglycine, N-methyl-ε-azido-L-lysine, and N-methyl-ε-azido-D-lysine.

[0458] In some embodiments, the —NH moiety of the amino acid is protected using a protecting group, including without limitation -Fmoc and -Boc. In other embodiments, the amino acid is not protected prior to synthesis of the peptidomimetic macrocycle.

[0459] In some embodiments, the —NH moiety of the amino acid is protected using a protecting group, including without limitation -Fmoc and -Boc. In other embodiments, the amino acid is not protected prior to synthesis of the peptidomimetic macrocycle.

[0460] The preparation of macrocycles of Formula IV is described, for example, in U.S. application Ser. No. 11/957,325, filed on Dec. 17, 2007 and herein incorporated by reference. Synthetic Schemes 6-9 describe the preparation of such compounds of Formula IV. To simplify the drawings, the illustrative schemes depict amino acid analogues derived from L- or D-cysteine, in which L₁ and L₃ are both —(CH₂)—. However, as noted throughout the detailed description above, many other amino acid analogues can be employed in which L₁ and L₃ can be independently selected from the various structures disclosed herein. The symbols “[AA]ₘ”, “[AA]ₙ”, “[AA]ₒ” represent a sequence of amide bond-linked moieties such as natural or unnatural amino acids. As described previously, each occurrence of “AA” is independent of any other occurrence of “AA”, and a formula such as “[AA]ₘ” encompasses, for example, sequences of non-identical amino acids as well as sequences of identical amino acids.

[chemical structure]

[chemical structure]

[0461] In Scheme 6, the peptidomimetic precursor contains two —SH moieties and is synthesized by solid-phase peptide synthesis (SPPS) using commercially available N-α-Fmoc amino acids such as N-α-Fmoc-S-trityl-L-cysteine or N-α-Fmoc-S-trityl-D-cysteine. Alpha-methylated versions of D-cysteine or L-cysteine are generated by known methods (Seebach et al. (1996), Angew. Chem. Int. Ed. Engl. 35:2708-2748, and references therein) and then converted to the appropriately protected N-α-Fmoc-S-trityl monomers by known methods (“Bioorganic Chemistry: Peptides and Proteins”, Oxford University Press, New York: 1998, the entire contents of which are incorporated herein by reference). The precursor peptidomimetic is then deprotected and cleaved from the solid-phase resin by standard conditions (e.g., strong acid such as 95% TFA). The precursor peptidomimetic is reacted as a crude mixture or is purified prior to reaction with X-L₂-Y in organic or aqueous solutions. In some embodiments the alkylation reaction is performed under dilute conditions (i.e. 0.15 mmol/L) to favor macrocyclization and to avoid polymerization. In some embodiments, the alkylation reaction is performed in organic solutions such as liquid NH₃ (Mosberg et al. (1985), J. Am. Chem. Soc. 107:2986-2987; Szewczuk et al. (1992), Int. J. Peptide Protein Res. 40:233-242), NH₃/MeOH, or NH₃/DMF (Or et al. (1991), J. Org. Chem. 56:3146-3149). In other embodiments, the alkylation is performed in an aqueous solution such as 6M guanidinium HCL, pH 8 (Brunel et al. (2005), Chem. Commun. (20):2552-2554). In other embodiments, the solvent used for the alkylation reaction is DMF or dichloroethane.

[chemical structure]

[chemical structure]

[0462] In Scheme 7, the precursor peptidomimetic contains two or more —SH moieties, of which two are specially protected to allow their selective deprotection and subsequent alkylation for macrocycle formation. The precursor peptidomimetic is synthesized by solid-phase peptide synthesis (SPPS) using commercially available N-α-Fmoc amino acids such as N-α-Fmoc-S-p-methoxytrityl-L-cysteine or N-α-Fmoc-S-p-methoxytrityl-D-cysteine. Alpha-methylated versions of D-cysteine or L-cysteine are generated by known methods (Seebach et al. (1996), Angew. Chem. Int. Ed. Engl. 35:2708-2748, and references therein) and then converted to the appropriately protected N-α-Fmoc-S-p-methoxytrityl monomers by known methods (Bioorganic Chemistry: Peptides and Proteins, Oxford University Press, New York: 1998, the entire contents of which are incorporated herein by reference). The Mmt protecting groups of the peptidomimetic precursor are then selectively cleaved by standard conditions (e.g., mild acid such as 1% TFA in DCM). The precursor peptidomimetic is then reacted on the resin with X-L₂-Y in an organic solution. For example, the reaction takes place in the presence of a hindered base such as diisopropylethylamine. In some embodiments, the alkylation reaction is performed in organic solutions such as liquid NH₃ (Mosberg et al. (1985), J. Am. Chem. Soc. 107:2986-2987; Szewczuk et al. (1992), Int. J. Peptide Protein Res. 40:233-242), NH₃/MeOH or NH₃/DMF (Or et al. (1991), J. Org. Chem. 56:3146-3149). In other embodiments, the alkylation reaction is performed in DMF or dichloroethane. The peptidomimetic macrocycle is then deprotected and cleaved from the solid-phase resin by standard conditions (e.g., strong acid such as 95% TFA).

[chemical structure]

[0463] In Scheme 8, the peptidomimetic precursor contains two or more —SH moieties, of which two are specially protected to allow their selective deprotection and subsequent alkylation for macrocycle formation. The peptidomimetic precursor is synthesized by solid-phase peptide synthesis (SPPS) using commercially available N-α-Fmoc amino acids such as N-α-Fmoc-S-p-methoxytrityl-L-cysteine, N-α-Fmoc-S-p-methoxytrityl-D-cysteine, N-α-Fmoc-S—S-t-butyl-L-cysteine, and N-α-Fmoc-S—S-t-butyl-D-cysteine. Alpha-methylated versions of D-cysteine or L-cysteine are generated by known methods (Seebach et al. (1996), Angew. Chem. Int. Ed. Engl. 35:2708-2748, and references therein) and then converted to the appropriately protected N-α-Fmoc-S-p-methoxytrityl or N-α-Fmoc-S—S-t-butyl monomers by known methods (Bioorganic Chemistry: Peptides and Proteins, Oxford University Press, New York: 1998, the entire contents of which are incorporated herein by reference). The S—S-tButyl protecting group of the peptidomimetic precursor is selectively cleaved by known conditions (e.g., 20% 2-mercaptoethanol in DMF, reference: Galande et al. (2005), J. Comb. Chem. 7:174-177). The precursor peptidomimetic is then reacted on the resin with a molar excess of X-L₂-Y in an organic solution. For example, the reaction takes place in the presence of a hindered base such as diisopropylethylamine. The Mmt protecting group of the peptidomimetic precursor is then selectively cleaved by standard conditions (e.g., mild acid such as 1% TFA in DCM). The peptidomimetic precursor is then cyclized on the resin by treatment with a hindered base in organic solutions. In some embodiments, the alkylation reaction is performed in organic solutions such as NH₃/MeOH or NH₃/DMF (Or et al. (1991), J. Org. Chem. 56:3146-3149). The peptidomimetic macrocycle is then deprotected and cleaved from the solid-phase resin by standard conditions (e.g., strong acid such as 95% TFA).

[chemical structure]

[0464] In Scheme 9, the peptidomimetic precursor contains two L-cysteine moieties. The peptidomimetic precursor is synthesized by known biological expression systems in living cells or by known in vitro, cell-free, expression methods. The precursor peptidomimetic is reacted as a crude mixture or is purified prior to reaction with X-L2-Y in organic or aqueous solutions. In some embodiments the alkylation reaction is performed under dilute conditions (i.e. 0.15 mmol/L) to favor macrocyclization and to avoid polymerization. In some embodiments, the alkylation reaction is performed in organic solutions such as liquid NH₃ (Mosberg et al. (1985), J. Am. Chem. Soc. 107:2986-2987; Szewczuk et al. (1992), Int. J. Peptide Protein Res. 40:233-242), NH₃/MeOH, or NH₃/DMF (Or et al. (1991), J. Org. Chem. 56:3146-3149). In other embodiments, the alkylation is performed in an aqueous solution such as 6M guanidinium HCL, pH 8 (Brunel et al. (2005), Chem. Commun. (20):2552-2554). In other embodiments, the alkylation is performed in DMF or dichloroethane. In another embodiment, the alkylation is performed in non-denaturing aqueous solutions, and in yet another embodiment the alkylation is performed under conditions that favor α-helical structure formation. In yet another embodiment, the alkylation is performed under conditions that favor the binding of the precursor peptidomimetic to another protein, so as to induce the formation of the bound α-helical conformation during the alkylation.

[0465] Various embodiments for X and Y are envisioned which are suitable for reacting with thiol groups. In general, each X or Y is independently be selected from the general category shown in Table 3. For example, X and Y are halides such as —Cl, —Br or —I. Any of the macrocycle-forming linkers described herein may be used in any combination with any of the sequences shown and also with any of the R-substituents indicated herein.

TABLE 3
Examples of Reactive Groups Capable of Reacting
with Thiol Groups and Resulting Linkages

| | Resulting Covalent |
|---|---|
| X or Y | Linkage |
| acrylamide | Thioether |
| halide (e.g. alkyl or aryl halide) | Thioether |
| sulfonate | Thioether |
| aziridine | Thioether |
| epoxide | Thioether |
| haloacetamide | Thioether |
| maleimide | Thioether |
| sulfonate ester | Thioether |

[0466] The present invention contemplates the use of both naturally occurring and non-naturally-occurring amino acids and amino acid analogues in the synthesis of the peptidomimetic macrocycles of Formula IV. Any amino acid or amino acid analogue amenable to the synthetic methods employed for the synthesis of stable bis-sulfhydryl containing peptidomimetic macrocycles can be used in the present invention. For example, cysteine is contemplated as a useful amino acid in the present invention. However, sulfur containing amino acids other than cysteine that contain a different amino acid side chain are also useful. For example, cysteine contains one methylene unit between the α-carbon of the amino acid and the terminal-SH of the amino acid side chain. The invention also contemplates the use of amino acids with multiple methylene units between the α-carbon and the terminal —SH. Non-limiting examples include α-methyl-L-homocysteine and α-methyl-D-homocysteine. In some embodiments the amino acids and amino acid analogues are of the D-configuration. In other embodiments they are of the L-configuration. In some embodiments, some of the amino acids and amino acid analogues contained in the peptidomimetic are of the D-configuration while some of the amino acids and amino acid analogues are of the L-configuration. In some embodiments the amino acid analogues are α,α-disubstituted, such as α-methyl-L-cysteine and α-methyl-D-cysteine.

[0467] The invention includes macrocycles in which macrocycle-forming linkers are used to link two or more —SH moieties in the peptidomimetic precursors to form the peptidomimetic macrocycles disclosed herein. As described above, the macrocycle-forming linkers impart conformational rigidity, increased metabolic stability or increased cell penetrability. Furthermore, in some embodiments, the macrocycle-forming linkages stabilize the α-helical secondary structure of the peptidomimetic macrocycles. The macrocycle-forming linkers are of the formula X-L₂-Y, wherein both X and Y are the same or different moieties, as defined above. Both X and Y have the chemical characteristics that allow one macrocycle-forming linker-L₂- to bis alkylate the bis-sulfhydryl containing peptidomimetic precursor. As defined above, the linker-L₂-includes alkylene, alkenylene, alkynylene, heteroalkylene, cycloalkylene, heterocycloalkylene, cycloarylene, or heterocycloarylene, or —R₄—K—R₄—, all of which can be optionally substituted with an R₅ group, as defined above. Furthermore, one to three carbon atoms within the macrocycle-forming linkers-L₂-, other than the carbons attached to the —SH of the sulfhydryl containing amino acid, are optionally substituted with a heteroatom such as N, S or O.

[0468] The L₂ component of the macrocycle-forming linker X-L₂-Y may be varied in length depending on, among other things, the distance between the positions of the two amino acid analogues used to form the peptidomimetic macrocycle. Furthermore, as the lengths of L₁ or L₃ components of the macrocycle-forming linker are varied, the length of L₂ can also be varied in order to create a linker of appropriate overall length for forming a stable peptidomimetic macrocycle. For example, if the amino acid analogues used are varied by adding an additional methylene unit to each of L₁ and L₃, the length of L₂ are decreased in length by the equivalent of approximately two methylene units to compensate for the increased lengths of L₁ and L₃.

[0469] In some embodiments, L₂ is an alkylene group of the formula —(CH₂)ₙ—, where n is 1, 2, 3, 4, 5, 6, 7, 8, 9, 10, 11, 12, 13, 14, or 15. For example, n is 1, 2, 3, 4, 5, 6, 7, 8, 9 or 10. In other embodiments, L₂ is an alkenylene group. In still other embodiments, L₂ is an aryl group.

[0470] Table 4 shows additional embodiments of X-L₂-Y groups.

TABLE 4
Example X-L₂-Y groups.

[chemical structure]

[chemical structure]

[chemical structure]

[chemical structure]

[chemical structure]

[chemical structure]

[chemical structure]

[chemical structure]

[chemical structure]

[chemical structure]

[chemical structure]

[chemical structure]

[chemical structure]

[chemical structure]

[chemical structure]

[chemical structure]

[chemical structure]

[chemical structure]

[chemical structure]

[chemical structure]

[chemical structure]

[chemical structure]

[chemical structure]

[chemical structure]

[chemical structure]

[chemical structure]

[chemical structure]

[chemical structure]

[chemical structure]

[chemical structure]

[chemical structure]

[chemical structure]

[chemical structure]

[chemical structure]

[chemical structure]

[chemical structure]

[chemical structure]

[chemical structure]

[chemical structure]

[chemical structure]

[chemical structure]

[chemical structure]

[chemical structure]

[chemical structure]

[chemical structure]

[chemical structure]

[chemical structure]

[chemical structure]

[chemical structure]

Each X and Y in this Table, is, for example, independently Cl—, Br—, I—.

[0471] Additional methods of forming peptidomimetic macrocycles which are envisioned as suitable to perform the present invention include those disclosed by Mustapa, M. Firouz Mohd et al., J. Org. Chem (2003), 68, pp. 8193-8198; Yang, Bin et al. Bioorg Med. Chem. Lett. (2004), 14, pp. 1403-1406; U.S. Pat. No. 5,364,851; U.S. Pat. No. 5,446,128; U.S. Pat. No. 5,824,483; U.S. Pat. No. 6,713,280; and U.S. Pat. No. 7,202,332. In such embodiments, amino acid precursors are used containing an additional substituent R— at the alpha position. Such amino acids are incorporated into the macrocycle precursor at the desired positions, which may be at the positions where the crosslinker is substituted or, alternatively, elsewhere in the sequence of the macrocycle precursor. Cyclization of the precursor is then performed according to the indicated method.

[0472] For example, a peptidomimetic macrocycle of Formula (II) is prepared as indicated:

[chemical structure]

wherein each AA1, AA2, AA3 is independently an amino acid side chain.

[0473] In other embodiments, a peptidomimetic macrocycle of Formula (II) is prepared as indicated:

[chemical structure]

wherein each AA1, AA2, AA3 is independently an amino acid side chain.

[0474] In some embodiments, a peptidomimetic macrocycle is obtained in more than one isomer, for example due to the configuration of a double bond within the structure of the crosslinker (E vs Z). Such isomers can or cannot be separable by conventional chromatographic methods. In some embodiments, one isomer has improved biological properties relative to the other isomer. In one embodiment, an E crosslinker olefin isomer of a peptidomimetic macrocycle has better solubility, better target affinity, better in vivo or in vitro efficacy, higher helicity, or improved cell permeability relative to its Z counterpart. In another embodiment, a Z crosslinker olefin isomer of a peptidomimetic macrocycle has better solubility, better target affinity, better in vivo or in vitro efficacy, higher helicity, or improved cell permeability relative to its E counterpart.

[0475] A compound described herein can be at least 1% pure, at least 2% pure, at least 3% pure, at least 4% pure, at least 5% pure, at least 6% pure, at least 7% pure, at least 8% pure, at least 9% pure, at least 10% pure, at least 11% pure, at least 12% pure, at least 13% pure, at least 14% pure, at least 15% pure, at least 16% pure, at least 17% pure, at least 18% pure, at least 19% pure, at least 20% pure, at least 21% pure, at least 22% pure, at least 23% pure, at least 24% pure, at least 25% pure, at least 26% pure, at least 27% pure, at least 28% pure, at least 29% pure, at least 30% pure, at least 31% pure, at least 32% pure, at least 33% pure, at least 34% pure, at least 35% pure, at least 36% pure, at least 37% pure, at least 38% pure, at least 39% pure, at least 40% pure, at least 41% pure, at least 42% pure, at least 43% pure, at least 44% pure, at least 45% pure, at least 46% pure, at least 47% pure, at least 48% pure, at least 49% pure, at least 50% pure, at least 51% pure, at least 52% pure, at least 53% pure, at least 54% pure, at least 55% pure, at least 56% pure, at least 57% pure, at least 58% pure, at least 59% pure, at least 60% pure, at least 61% pure, at least 62% pure, at least 63% pure, at least 64% pure, at least 65% pure, at least 66% pure, at least 67% pure, at least 68% pure, at least 69% pure, at least 70% pure, at least 71% pure, at least 72% pure, at least 73% pure, at least 74% pure, at least 75% pure, at least 76% pure, at least 77% pure, at least 78% pure, at least 79% pure, at least 80% pure, at least 81% pure, at least 82% pure, at least 83% pure, at least 84% pure, at least 85% pure, at least 86% pure, at least 87% pure, at least 88% pure, at least 89% pure, at least 90% pure, at least 91% pure, at least 92% pure, at least 93% pure, at least 94% pure, at least 95% pure, at least 96% pure, at least 97% pure, at least 98% pure, at least 99% pure, at least 99.1% pure, at least 99.2% pure, at least 99.3% pure, at least 99.4% pure, at least 99.5% pure, at least 99.6% pure, at least 99.7% pure, at least 99.8% pure, or at least 99.9% pure on a chemical, optical, isomeric, enantiomeric, or diastereomeric basis. Purity can be assessed, for example, by HPLC, MS, LC/MS, melting point, or NMR.

### Assays

[0476] The properties of the peptidomimetic macrocycles of the invention are assayed, for example, by using the methods described below. In some embodiments, a peptidomimetic macrocycle of the invention has improved biological properties relative to a corresponding polypeptide lacking the substituents described herein.

[0477] In some embodiments, a peptidomimetic macrocycle disclosed herein selectively binds BFL-1, or a BCL-2 family protein, selectively over another protein that has a BH3 domain. In some embodiments, the selectivity is a ratio of about 2 to about 1, about 3 to about 1, about 4 to about 1, about 5 to about 1, about 6 to about 1, about 7 to about 1, about 8 to about 1, about 9 to about 1, about 10 to about 1, about 20 to about 1, about 30 to about 1, about 40 to about 1, about 50 to about 1, about 60 to about 1, about 70 to about 1, about 80 to about 1, about 90 to about 1, about 100 to about 1, about 200 to about 1, about 300 to about 1, about 400 to about 1, about 500 to about 1, about 600 to about 1, about 700 to about 1, about 800 to about 1, about 900 to about 1, or about 1000 to about 1.

[0478] In some embodiments, a peptidomimetic macrocycle disclosed herein non-selectively binds additional types of proteins that have a BH3 domain. In some embodiments, the non-selectivity is at least about 2 types of proteins, at least about 3 types of proteins, at least about 4 types of proteins, at least about 5 types of proteins, at least about 6 types of proteins, at least about 7 types of proteins, at least about 8 types of proteins, at least about 9 types of proteins, at least about 10 types of proteins, at least about 11 types of protein, at least about 12 types of proteins, at least about 13 types of proteins, at least about 14 types of proteins, at least about 15 types of proteins, at least about 16 types of proteins, at least about 17 types of proteins, at least about 18 types of proteins, at least about 19 types of proteins, or at least about 20 types of proteins. In some embodiments, the non-selectivity is from about 2 types of protein to about 3 types of protein, from about 3 types of protein to about 4 types of protein, from about 4 types of protein to about 5 types of protein, from about 5 types of protein to about 6 types of protein, from about 6 types of protein to about 7 types of protein, from about 7 types of protein to about 8 types of protein, from about 8 types of protein to about 9 types of protein, from about 9 types of protein to about 10 types of protein, from about 10 types of protein to about 11 types of protein, from about 11 types of protein to about 12 types of protein, from about 12 types of protein to about 13 types of protein, from about 13 types of protein to about 14 types of protein, from about 14 types of protein to about 15 types of protein, from about 15 types of protein to about 16 types of protein, from about 16 types of protein to about 17 types of protein, from about 17 types of protein to about 18 types of protein, from about 18 types of protein to about 19 types of protein, or from about 19 types of protein to about 20 types of protein.

### Assay to Determine α-Helicity.

[0479] In solution, the secondary structure of polypeptides with α-helical domains will reach a dynamic equilibrium between random coil structures and α-helical structures, often expressed as a “percent helicity”. Thus, for example, alpha-helical domains are predominantly random coils in solution, with α-helical content usually under 25%. Peptidomimetic macrocycles with optimized linkers, on the other hand, possess, for example, an alpha-helicity that is at least two-fold greater than that of a corresponding uncrosslinked polypeptide. In some embodiments, macrocycles of the invention will possess an alpha-helicity of greater than 50%. To assay the helicity of peptidomimetic macrocycles of the invention, the compounds are dissolved in an aqueous solution (e.g. 50 mM potassium phosphate solution at pH 7, or distilled H₂O, to concentrations of 25-50 μM). Circular dichroism (CD) spectra are obtained on a spectropolarimeter (e.g., Jasco J-710) using standard measurement parameters (e.g. temperature, 20° C.; wavelength, 190-260 nm; step resolution, 0.5 nm; speed, 20 nm/sec; accumulations, 10; response, 1 sec; bandwidth, 1 nm; path length, 0.1 cm). The α-helical content of each peptide is calculated by dividing the mean residue ellipticity (e.g. [Φ]222obs) by the reported value for a model helical decapeptide (Yang et al. (1986), Methods Enzymol. 130:208)).

### Assay to Determine Melting Temperature (Tm).

[0480] A peptidomimetic macrocycle of the invention comprising a secondary structure such as an α-helix exhibits, for example, a higher melting temperature than a corresponding uncrosslinked polypeptide. Typically peptidomimetic macrocycles of the invention exhibit Tm of >60° C. representing a highly stable structure in aqueous solutions. To assay the effect of macrocycle formation on melting temperature, peptidomimetic macrocycles or unmodified peptides are dissolved in distilled H₂O (e.g. at a final concentration of 50 μM) and the Tm is determined by measuring the change in ellipticity over a temperature range (e.g. 4 to 95° C.) on a spectropolarimeter (e.g., Jasco J-710) using standard parameters (e.g. wavelength 222 nm; step resolution, 0.5 nm; speed, 20 nm/sec; accumulations, 10; response, 1 sec; bandwidth, 1 nm; temperature increase rate: 1° C./min; path length, 0.1 cm).

### Protease Resistance Assay.

[0481] The amide bond of the peptide backbone is susceptible to hydrolysis by proteases, thereby rendering peptidic compounds vulnerable to rapid degradation in vivo. Peptide helix formation, however, typically buries the amide backbone and therefore may shield it from proteolytic cleavage. The peptidomimetic macrocycles of the present invention may be subjected to in vitro trypsin proteolysis to assess for any change in degradation rate compared to a corresponding uncrosslinked polypeptide. For example, the peptidomimetic macrocycle and a corresponding uncrosslinked polypeptide are incubated with trypsin agarose and the reactions quenched at various time points by centrifugation and subsequent HPLC injection to quantitate the residual substrate by ultraviolet absorption at 280 nm. Briefly, the peptidomimetic macrocycle and peptidomimetic precursor (5 mcg) are incubated with trypsin agarose (Pierce) (S/E ˜125) for 0, 10, 20, 90, and 180 minutes. Reactions are quenched by tabletop centrifugation at high speed; remaining substrate in the isolated supernatant is quantified by HPLC-based peak detection at 280 nm. The proteolytic reaction displays first order kinetics and the rate constant, k, is determined from a plot of 1n[S] versus time (k=−1×slope).

### Ex Vivo Stability Assay.

[0482] Peptidomimetic macrocycles with optimized linkers possess, for example, an ex vivo half-life that is at least two-fold greater than that of a corresponding uncrosslinked polypeptide, and possess an ex vivo half-life of 12 hours or more. For ex vivo serum stability studies, a variety of assays may be used. For example, a peptidomimetic macrocycle and a corresponding uncrosslinked polypeptide (2 mcg) are incubated with fresh mouse, rat or human serum (2 mL) at 37° C. for 0, 1, 2, 4, 8, and 24 hours. To determine the level of intact compound, the following procedure may be used: The samples are extracted by transferring 100 μl of sera to 2 ml centrifuge tubes followed by the addition of 10 μL of 50% formic acid and 500 μL acetonitrile and centrifugation at 14,000 RPM for 10 min at 4±2° C. The supernatants are then transferred to fresh 2 ml tubes and evaporated on Turbovap under N₂<10 psi, 37° C. The samples are reconstituted in 100 μL of 50:50 acetonitrile:water and submitted to LC-MS/MS analysis.

### In Vitro Binding Assays.

[0483] To assess the binding and affinity of peptidomimetic macrocycles and peptidomimetic precursors to acceptor proteins, a fluorescence polarization assay (FPA) is used, for example. The FPA technique measures the molecular orientation and mobility using polarized light and fluorescent tracer. When excited with polarized light, fluorescent tracers (e.g., FITC) attached to molecules with high apparent molecular weights (e.g. FITC-labeled peptides bound to a large protein) emit higher levels of polarized fluorescence due to their slower rates of rotation as compared to fluorescent tracers attached to smaller molecules (e.g. FITC-labeled peptides that are free in solution).

[0484] For example, fluoresceinated peptidomimetic macrocycles (25 nM) are incubated with the acceptor protein (25-1000 nM) in binding buffer (140 mM NaCl, 50 mM Tris-HCL, pH 7.4) for 30 minutes at room temperature. Binding activity is measured, for example, by fluorescence polarization on a luminescence spectrophotometer (e.g. Perkin-Elmer LS50B). K_{d} values may be determined by nonlinear regression analysis using, for example, Graphpad Prism software (GraphPad Software, Inc., San Diego, Calif.). A peptidomimetic macrocycle of the invention shows, in some instances, similar or lower Kd than a corresponding uncrosslinked polypeptide.

### In Vitro Displacement Assays to Characterize Antagonists of Peptide-Protein Interactions.

[0485] To assess the binding and affinity of compounds that antagonize the interaction between a peptide and an acceptor protein, a fluorescence polarization assay (FPA) utilizing a fluoresceinated peptidomimetic macrocycle derived from a peptidomimetic precursor sequence is used, for example. The FPA technique measures the molecular orientation and mobility using polarized light and fluorescent tracer. When excited with polarized light, fluorescent tracers (e.g., FITC) attached to molecules with high apparent molecular weights (e.g. FITC-labeled peptides bound to a large protein) emit higher levels of polarized fluorescence due to their slower rates of rotation as compared to fluorescent tracers attached to smaller molecules (e.g. FITC-labeled peptides that are free in solution). A compound that antagonizes the interaction between the fluoresceinated peptidomimetic macrocycle and an acceptor protein will be detected in a competitive binding FPA experiment.

[0486] For example, putative antagonist compounds (1 nM to 1 mM) and a fluoresceinated peptidomimetic macrocycle (25 nM) are incubated with the acceptor protein (50 nM) in binding buffer (140 mM NaCl, 50 mM Tris-HCL, pH 7.4) for 30 minutes at room temperature. Antagonist binding activity is measured, for example, by fluorescence polarization on a luminescence spectrophotometer (e.g. Perkin-Elmer LS50B). Kd values may be determined by nonlinear regression analysis using, for example, Graphpad Prism software (GraphPad Software, Inc., San Diego, Calif.).

[0487] Any class of molecule, such as small organic molecules, peptides, oligonucleotides or proteins can be examined as putative antagonists in this assay.

### Assay for Protein-Ligand Binding by Affinity Selection-Mass Spectrometry.

[0488] To assess the binding and affinity of test compounds for proteins, an affinity-selection mass spectrometry assay is used, for example. Protein-ligand binding experiments are conducted according to the following representative procedure outlined for a system-wide control experiment using 1 μM peptidomimetic macrocycle plus 5 μM target protein. A 1 μL DMSO aliquot of a 40 μM stock solution of peptidomimetic macrocycle is dissolved in 19 μL of PBS (Phosphate-buffered saline: 50 mM, pH 7.5 Phosphate buffer containing 150 mM NaCl). The resulting solution is mixed by repeated pipetting and clarified by centrifugation at 10 000 g for 10 min. To a 4 μL aliquot of the resulting supernatant is added 4 μL of 10 μM target protein in PBS. Each 8.0 μL experimental sample thus contains 40 pmol (1.5 μg) of protein at 5.0 μM concentration in PBS plus 1 μM peptidomimetic macrocycle and 2.5% DMSO. Duplicate samples thus prepared for each concentration point are incubated for 60 min at room temperature, and then chilled to 4° C. prior to size-exclusion chromatography-LC-MS analysis of 5.0 μL injections. Samples containing a target protein, protein-ligand complexes, and unbound compounds are injected onto an SEC column, where the complexes are separated from non-binding component by a rapid SEC step. The SEC column eluate is monitored using UV detectors to confirm that the early-eluting protein fraction, which elutes in the void volume of the SEC column, is well resolved from unbound components that are retained on the column. After the peak containing the protein and protein-ligand complexes elutes from the primary UV detector, it enters a sample loop where it is excised from the flow stream of the SEC stage and transferred directly to the LC-MS via a valving mechanism. The (M+3H)³⁺ ion of the peptidomimetic macrocycle is observed by ESI-MS at the expected m/z, confirming the detection of the protein-ligand complex.

### Assay for Protein-Ligand K_{d} Titration Experiments.

[0489] To assess the binding and affinity of test compounds for proteins, a protein-ligand Kd titration experiment is performed. Protein-ligand K_{d} titrations experiments are conducted as follows: 2 μL DMSO aliquots of a serially diluted stock solution of titrant peptidomimetic macrocycle (5, 2.5, . . . , 0.098 mM) are prepared then dissolved in 38 μL of PBS. The resulting solutions are mixed by repeated pipetting and clarified by centrifugation at 10 000 g for 10 min. To 4.0 μL aliquots of the resulting supernatants is added 4.0 μL of 10 μM target protein in PBS. Each 8.0 μL experimental sample thus contains 40 pmol (1.5 μg) of protein at 5.0 μM concentration in PBS, varying concentrations (125, 62.5, . . . , 0.24 μM) of the titrant peptide, and 2.5% DMSO. Duplicate samples thus prepared for each concentration point are incubated at room temperature for 30 min, then chilled to 4° C. prior to SEC-LC-MS analysis of 2.0 μL injections. The (M+H)¹⁺, (M+2H)²⁺, (M+3H)³⁺, or (M+Na)¹⁺ ion is observed by ESI-MS; extracted ion chromatograms are quantified, then fit to equations to derive the binding affinity K_{d} as described in “A General Technique to Rank Protein-Ligand Binding Affinities and Determine Allosteric vs. Direct Binding Site Competition in Compound Mixtures.” Annis, D. A.; Nazef, N.; Chuang, C. C.; Scott, M. P.; Nash, H. M. J. Am. Chem. Soc. 2004, 126, 15495-15503; also in “ALIS: An Affinity Selection-Mass Spectrometry System for the Discovery and Characterization of Protein-Ligand Interactions” D. A. Annis, C.-C. Chuang, and N. Nazef. In Mass Spectrometry in Medicinal Chemistry. Edited by Wanner K, Höfner G: Wiley-VCH; 2007:121-184. Mannhold R, Kubinyi H, Folkers G (Series Editors): Methods and Principles in Medicinal Chemistry.

### Assay for Competitive Binding Experiments by Affinity Selection-Mass Spectrometry.

[0490] To determine the ability of test compounds to bind competitively to proteins, an affinity selection mass spectrometry assay is performed, for example. A mixture of ligands at 40 μM per component is prepared by combining 2 μL aliquots of 400 μM stocks of each of the three compounds with 14 μL of DMSO. Then, 1 μL aliquots of this 40 μM per component mixture are combined with 1 μL DMSO aliquots of a serially diluted stock solution of titrant peptidomimetic macrocycle (10, 5, 2.5, . . . , 0.078 mM). These 2 μL samples are dissolved in 38 μL of PBS. The resulting solutions were mixed by repeated pipetting and clarified by centrifugation at 10 000 g for 10 min. To 4.0 μL aliquots of the resulting supernatants is added 4.0 μL of 10 μM target protein in PBS. Each 8.0 μL experimental sample thus contains 40 pmol (1.5 μg) of protein at 5.0 μM concentration in PBS plus 0.5 μM ligand, 2.5% DMSO, and varying concentrations (125, 62.5, . . . , 0.98 μM) of the titrant peptidomimetic macrocycle. Duplicate samples thus prepared for each concentration point are incubated at room temperature for 60 min, then chilled to 4° C. prior to SEC-LC-MS analysis of 2.0 μL injections. Additional details on these and other methods are provided in “A General Technique to Rank Protein-Ligand Binding Affinities and Determine Allosteric vs. Direct Binding Site Competition in Compound Mixtures.” Annis, D. A.; Nazef, N.; Chuang, C. C.; Scott, M. P.; Nash, H. M. J. Am. Chem. Soc. 2004, 126, 15495-15503; also in “ALIS: An Affinity Selection-Mass Spectrometry System for the Discovery and Characterization of Protein-Ligand Interactions” D. A. Annis, C.-C. Chuang, and N. Nazef. In Mass Spectrometry in Medicinal Chemistry. Edited by Wanner K, Höfner G: Wiley-VCH; 2007:121-184. Mannhold R, Kubinyi H, Folkers G (Series Editors): Methods and Principles in Medicinal Chemistry.

### Binding Assays in Intact Cells.

[0491] It is possible to measure binding of peptides or peptidomimetic macrocycles to their natural acceptors in intact cells by immunoprecipitation experiments. For example, intact cells are incubated with fluoresceinated (FITC-labeled) compounds for 4 hrs in the absence of serum, followed by serum replacement and further incubation that ranges from 4-18 hrs. Cells are then pelleted and incubated in lysis buffer (50 mM Tris [pH 7.6], 150 mM NaCl, 1% CHAPS and protease inhibitor cocktail) for 10 minutes at 4° C. Extracts are centrifuged at 14,000 rpm for 15 minutes and supernatants collected and incubated with 10 μl goat anti-FITC antibody for 2 hrs, rotating at 4° C. followed by further 2 hrs incubation at 4° C. with protein A/G Sepharose (50 μl of 50% bead slurry). After quick centrifugation, the pellets are washed in lysis buffer containing increasing salt concentration (e.g., 150, 300, 500 mM). The beads are then re-equilibrated at 150 mM NaCl before addition of SDS-containing sample buffer and boiling. After centrifugation, the supernatants are optionally electrophoresed using 4%-12% gradient Bis-Tris gels followed by transfer into Immobilon-P membranes. After blocking, blots are optionally incubated with an antibody that detects FITC and also with one or more antibodies that detect proteins that bind to the peptidomimetic macrocycle.

### Cellular Penetrability Assays.

[0492] To measure the cell penetrability of peptidomimetic macrocycles and corresponding uncrosslinked macrocycle, intact cells are incubated with fluoresceinated peptidomimetic macrocycles or corresponding uncrosslinked macrocycle (10 μM) for 4 hrs in serum free media at 37° C., washed twice with media and incubated with trypsin (0.25%) for 10 min at 37° C. The cells are washed again and resuspended in PBS. Cellular fluorescence is analyzed, for example, by using either a FACSCalibur flow cytometer or Cellomics' KineticScan® HCS Reader.

### In Vivo Stability Assays.

[0493] To investigate the in vivo stability of the peptidomimetic macrocycles, the compounds are, for example, administered to mice or rats by IV, IP, PO or inhalation routes at concentrations ranging from 0.1 to 50 mg/kg and blood specimens withdrawn at 0′, 5′, 15′, 30′, 1 hr, 4 hrs, 8 hrs and 24 hours post-injection. Levels of intact compound in 25 μL of fresh serum are then measured by LC-MS/MS as above.

### Clinical Trials.

[0494] To determine the suitability of the peptidomimetic macrocycles of the invention for treatment of humans, clinical trials are performed. For example, patients diagnosed with a muscle wasting disease or lipodystrophy and in need of treatment are selected and separated in treatment and one or more control groups, wherein the treatment group is administered a peptidomimetic macrocycle of the invention, while the control groups receive a placebo or a known BH3 mimetic. The treatment safety and efficacy of the peptidomimetic macrocycles of the invention can thus be evaluated by performing comparisons of the patient groups with respect to factors such as survival and quality-of-life. In this example, the patient group treated with a peptidomimetic macrocycle show improved long-term survival compared to a patient control group treated with a placebo.

### Pharmaceutical Compositions and Routes of Administration

[0495] In some embodiments, the present invention provides a pharmaceutical composition comprising a peptidomimetic macrocycle of the invention and a pharmaceutically acceptable carrier.

[0496] The peptidomimetic macrocycles of the invention also include pharmaceutically acceptable derivatives or prodrugs thereof. A “pharmaceutically acceptable derivative” means any pharmaceutically acceptable salt, ester, salt of an ester, pro-drug or other derivative of a compound of this invention which, upon administration to a recipient, is capable of providing (directly or indirectly) a compound of this invention. Particularly favored pharmaceutically acceptable derivatives are those that increase the bioavailability of the compounds of the invention when administered to a mammal (e.g., by increasing absorption into the blood of an orally administered compound) or which increases delivery of the active compound to a biological compartment (e.g., the brain or lymphatic system) relative to the parent species. Some pharmaceutically acceptable derivatives include a chemical group which increases aqueous solubility or active transport across the gastrointestinal mucosa.

[0497] In some embodiments, the peptidomimetic macrocycles of the invention are modified by covalently or non-covalently joining appropriate functional groups to enhance selective biological properties. Such modifications include those which increase biological penetration into a given biological compartment (e.g., blood, lymphatic system, central nervous system), increase oral availability, increase solubility to allow administration by injection, alter metabolism, and alter rate of excretion.

[0498] Pharmaceutically acceptable salts of the compounds of this invention include those derived from pharmaceutically acceptable inorganic and organic acids and bases. Examples of suitable acid salts include acetate, adipate, benzoate, benzenesulfonate, butyrate, citrate, digluconate, dodecylsulfate, formate, fumarate, glycolate, hemisulfate, heptanoate, hexanoate, hydrochloride, hydrobromide, hydroiodide, lactate, maleate, malonate, methanesulfonate, 2-naphthalenesulfonate, nicotinate, nitrate, palmoate, phosphate, picrate, pivalate, propionate, salicylate, succinate, sulfate, tartrate, tosylate and undecanoate. Salts derived from appropriate bases include alkali metal (e.g., sodium), alkaline earth metal (e.g., magnesium), ammonium and N-(alkyl)₄⁺ salts.

[0499] For preparing pharmaceutical compositions from the compounds of the present invention, pharmaceutically acceptable carriers include either solid or liquid carriers. Solid form preparations include powders, tablets, pills, capsules, cachets, suppositories, and dispersible granules. A solid carrier can be one or more substances, which also acts as diluents, flavoring agents, binders, preservatives, tablet disintegrating agents, or an encapsulating material. Details on techniques for formulation and administration are well described in the scientific and patent literature, see, e.g., the latest edition of Remington's Pharmaceutical Sciences, Maack Publishing Co, Easton Pa.

[0500] In powders, the carrier is a finely divided solid, which is in a mixture with the finely divided active component. In tablets, the active component is mixed with the carrier having the necessary binding properties in suitable proportions and compacted in the shape and size desired.

[0501] Suitable solid excipients are carbohydrate or protein fillers include, but are not limited to sugars, including lactose, sucrose, mannitol, or sorbitol; starch from corn, wheat, rice, potato, or other plants; cellulose such as methyl cellulose, hydroxypropylmethyl-cellulose, or sodium carboxymethylcellulose; and gums including arabic and tragacanth; as well as proteins such as gelatin and collagen. If desired, disintegrating or solubilizing agents are added, such as the cross-linked polyvinyl pyrrolidone, agar, alginic acid, or a salt thereof, such as sodium alginate.

[0502] Liquid form preparations include solutions, suspensions, and emulsions, for example, water or water/propylene glycol solutions. For parenteral injection, liquid preparations can be formulated in solution in aqueous polyethylene glycol solution.

[0503] The pharmaceutical preparation is preferably in unit dosage form. In such form the preparation is subdivided into unit doses containing appropriate quantities of the active component. The unit dosage form can be a packaged preparation, the package containing discrete quantities of preparation, such as packeted tablets, capsules, and powders in vials or ampoules. Also, the unit dosage form can be a capsule, tablet, cachet, or lozenge itself, or it can be the appropriate number of any of these in packaged form.

[0504] When the compositions of this invention comprise a combination of a peptidomimetic macrocycle and one or more additional therapeutic or prophylactic agents, both the compound and the additional agent should be present at dosage levels of between about 1 to 100%, and more preferably between about 5 to 95% of the dosage normally administered in a monotherapy regimen. In some embodiments, the additional agents are administered separately, as part of a multiple dose regimen, from the compounds of this invention. Alternatively, those agents are part of a single dosage form, mixed together with the compounds of this invention in a single composition.

[0505] In some embodiments, the compositions are present as unit dosage forms that can deliver, for example, from about 0.0001 mg to about 1,000 mg of the peptidomimetic macrocycles, salts thereof, prodrugs thereof, derivatives thereof, or any combination of these. Thus, the unit dosage forms can deliver, for example, in some embodiments, from about 1 mg to about 900 mg, from about 1 mg to about 800 mg, from about 1 mg to about 700 mg, from about 1 mg to about 600 mg, from about 1 mg to about 500 mg, from about 1 mg to about 400 mg, from about 1 mg to about 300 mg, from about 1 mg to about 200 mg, from about 1 mg to about 100 mg, from about 1 mg to about 10 mg, from about 1 mg to about 5 mg, from about 0.1 mg to about 10 mg, from about 0.1 mg to about 5 mg, from about 10 mg to about 1,000 mg, from about 50 mg to about 1,000 mg, from about 100 mg to about 1,000 mg, from about 200 mg to about 1,000 mg, from about 300 mg to about 1,000 mg, from about 400 mg to about 1,000 mg, from about 500 mg to about 1,000 mg, from about 600 mg to about 1,000 mg, from about 700 mg to about 1,000 mg, from about 800 mg to about 1,000 mg, from about 900 mg to about 1,000 mg, from about 10 mg to about 900 mg, from about 100 mg to about 800 mg, from about 200 mg to about 700 mg, or from about 300 mg to about 600 mg of the peptidomimetic macrocycles, salts thereof, prodrugs thereof, derivatives thereof, or any combination of these.

[0506] In some embodiments, the compositions are present as unit dosage forms that can deliver, for example, about 1 mg, about 2 mg, about 3 mg, about 4 mg, about 5 mg, about 6 mg, about 7 mg, about 8 mg, about 9 mg, about 10 mg, about 20 mg, about 30 mg, about 40 mg, about 50 mg, about 60 mg, about 70 mg, about 80 mg, about 90 mg, about 100 mg, about 150 mg, about 200 mg, about 250 mg, about 300 mg, about 350 mg, about 400 mg, about 500 mg, about 600 mg, about 700 mg, about 800 mg, or about 1000 mg of peptidomimetic macrocycles, salts thereof, prodrugs thereof, derivatives thereof, or any combination of these.

[0507] Suitable routes of administration include, but are not limited to, oral, intravenous, rectal, aerosol, parenteral, ophthalmic, pulmonary, transmucosal, transdermal, vaginal, otic, nasal, and topical administration. In addition, by way of example only, parenteral delivery includes intramuscular, subcutaneous, intravenous, intramedullary injections, as well as intrathecal, direct intraventricular, intraperitoneal, intralymphatic, and intranasal injections.

[0508] In certain embodiments, a composition as described herein is administered in a local rather than systemic manner, for example, via injection of the compound directly into an organ. In specific embodiments, long acting formulations are administered by implantation (for example subcutaneously or intramuscularly) or by intramuscular injection. Furthermore, in other embodiments, the drug is delivered in a targeted drug delivery system, for example, in a liposome coated with organ-specific antibody. In such embodiments, the liposomes are targeted to and taken up selectively by the organ. In yet other embodiments, the compound as described herein is provided in the form of a rapid release formulation, in the form of an extended release formulation, or in the form of an intermediate release formulation. In yet other embodiments, the compound described herein is administered topically.

[0509] In another embodiment, compositions described herein are formulated for oral administration. Compositions described herein are formulated by combining a peptidomimetic macrocycle with, e.g., pharmaceutically acceptable carriers or excipients. In various embodiments, the compounds described herein are formulated in oral dosage forms that include, by way of example only, tablets, powders, pills, dragees, capsules, liquids, gels, syrups, elixirs, slurries, suspensions and the like.

[0510] In certain embodiments, pharmaceutical preparations for oral use are obtained by mixing one or more solid excipient with one or more of the peptidomimetic macrocycles described herein, optionally grinding the resulting mixture, and processing the mixture of granules, after adding suitable auxiliaries, if desired, to obtain tablets or dragee cores. Suitable excipients are, in particular, fillers such as sugars, including lactose, sucrose, mannitol, or sorbitol; cellulose preparations such as: for example, maize starch, wheat starch, rice starch, potato starch, gelatin, gum tragacanth, methylcellulose, microcrystalline cellulose, hydroxypropylmethylcellulose, sodium carboxymethylcellulose; or others such as: polyvinylpyrrolidone (PVP or povidone) or calcium phosphate. In specific embodiments, disintegrating agents are optionally added. Disintegrating agents include, by way of example only, cross-linked croscarmellose sodium, polyvinylpyrrolidone, agar, or alginic acid or a salt thereof such as sodium alginate.

[0511] In one embodiment, dosage forms, such as dragee cores and tablets, are provided with one or more suitable coating. In specific embodiments, concentrated sugar solutions are used for coating the dosage form. The sugar solutions, optionally contain additional components, such as by way of example only, gum arabic, talc, polyvinylpyrrolidone, carbopol gel, polyethylene glycol, or titanium dioxide, lacquer solutions, and suitable organic solvents or solvent mixtures. Dyestuffs or pigments are also optionally added to the coatings for identification purposes. Additionally, the dyestuffs or pigments are optionally utilized to characterize different combinations of active compound doses.

[0512] In certain embodiments, therapeutically effective amounts of at least one of the peptidomimetic macrocycles described herein are formulated into other oral dosage forms. Oral dosage forms include push-fit capsules made of gelatin, as well as soft, sealed capsules made of gelatin and a plasticizer, such as glycerol or sorbitol. In specific embodiments, push-fit capsules contain the active ingredients in admixture with one or more filler. Fillers include, by way of example only, lactose, binders such as starches, or lubricants such as talc or magnesium stearate and, optionally, stabilizers. In other embodiments, soft capsules, contain one or more active compound that is dissolved or suspended in a suitable liquid. Suitable liquids include, by way of example only, one or more fatty oil, liquid paraffin, or liquid polyethylene glycol. In addition, stabilizers are optionally added.

[0513] In other embodiments, therapeutically effective amounts of at least one of the peptidomimetic macrocycles described herein are formulated for buccal or sublingual administration. Formulations suitable for buccal or sublingual administration include, by way of example only, tablets, lozenges, or gels. In still other embodiments, the peptidomimetic macrocycles described herein are formulated for parenteral injection, including formulations suitable for bolus injection or continuous infusion. In specific embodiments, formulations for injection are presented in unit dosage form (e.g., in ampoules) or in multi-dose containers. Preservatives are, optionally, added to the injection formulations. In still other embodiments, pharmaceutical compositions are formulated in a form suitable for parenteral injection as a sterile suspensions, solutions or emulsions in oily or aqueous vehicles. Parenteral injection formulations optionally contain formulatory agents such as suspending, stabilizing or dispersing agents. In specific embodiments, pharmaceutical formulations for parenteral administration include aqueous solutions of the active compounds in water-soluble form. In additional embodiments, suspensions of the active compounds are prepared as appropriate oily injection suspensions. Suitable lipophilic solvents or vehicles for use in the pharmaceutical compositions described herein include, by way of example only, fatty oils such as sesame oil, or synthetic fatty acid esters, such as ethyl oleate or triglycerides, or liposomes. In certain specific embodiments, aqueous injection suspensions contain substances which increase the viscosity of the suspension, such as sodium carboxymethyl cellulose, sorbitol, or dextran. Optionally, the suspension contains suitable stabilizers or agents which increase the solubility of the compounds to allow for the preparation of highly concentrated solutions. Alternatively, in other embodiments, the active ingredient is in powder form for constitution with a suitable vehicle, e.g., sterile pyrogen-free water, before use.

[0514] Pharmaceutical compositions herein can be administered, for example, once or twice or three or four or five or six times per day, or once or twice or three or four or five or six times per week, and can be administered, for example, for a day, a week, a month, 3 months, six months, a year, five years, or for example ten years. In some embodiments, a pharmaceutical formulation of the invention is administered no more frequently than once daily, no more frequently than every other day, no more frequently than twice weekly, no more frequently than three times weekly, no more frequently than four times weekly, no more frequently than five times weekly, or no more frequently than every other week. In some embodiments, a pharmaceutical formulation of the invention is administered no more than once weekly. In some embodiments, a pharmaceutical formulation of the invention is administered no more than twice weekly. In some embodiments, a pharmaceutical formulation of the invention is administered no more than three times weekly. In some embodiments, a pharmaceutical formulation of the invention is administered no more than four times weekly. In some embodiments, a pharmaceutical formulation of the invention is administered no more than five times weekly.

### Methods of Use

[0515] As used herein, the term “treatment” is defined as the application or administration of a therapeutic agent to a patient, or application or administration of a therapeutic agent to an isolated tissue or cell line from a patient, who has a disease, a symptom of disease or a predisposition toward a disease, with the purpose to cure, heal, alleviate, relieve, alter, remedy, ameliorate, improve or affect the disease, the symptoms of disease or the predisposition toward disease. In some embodiments, a peptidomimetic macrocycle disclosed herein is used for treating a disease or condition in a subject in need thereof. In some embodiments, a peptidomimetic macrocycle disclosed herein is used for manufacture of a medicament for treating a disease or condition in a subject in need thereof.

[0516] In one aspect, the present invention provides novel peptidomimetic macrocycles that are useful in competitive binding assays to identify agents which bind to a natural ligand of the proteins or peptides upon which the peptidomimetic macrocycles are modeled. For example, labeled peptidomimetic macrocycles based on BIM can be used in a binding assay along with small molecules that competitively bind to BFL-1 or a BCL-2 family protein. Competitive binding studies allow for rapid in vitro evaluation and determination of drug candidates specific to the BIM/BFL-1 or a BCL-2 family protein interaction. Such binding studies may be performed with any of the peptidomimetic macrocycles disclosed herein and their binding partners.

[0517] The invention further provides for the generation of antibodies against the peptidomimetic macrocycles. In some embodiments, these antibodies specifically bind both the peptidomimetic macrocycle and the precursor peptides, such as BIM, to which the peptidomimetic macrocycles are related. Such antibodies, for example, disrupt the native protein-protein interactions, for example, between BIM and BFL-1 or a BCL-2 family protein.

[0518] In another aspect, the present invention provides methods to inhibit BFL-1 or a BCL-2 family protein, thereby stimulating death of a cell or tissue. In some embodiments, a subject suffering from a condition of suppressed cell death, such as B-cell lymphoma, is treated using pharmaceutical compositions of the invention.

[0519] In yet another aspect, the present invention provides methods for treating a disease driven by over-expression of BFL-1 or a BCL-2 family protein. In some embodiments, the disease driven by over-expression is a cancer. The cancer can be a liquid cancer or a solid cancer. Non-limiting examples of a liquid cancer include leukemia, lymphoma, myeloma, and myeloid dysplasia. Non-limiting examples of a solid cancer include lung cancer, breast cancer, colon cancer, brain cancer, liver cancer, soft-tissue sarcoma, pancreatic cancer, and melanoma. In some embodiments, the cancer is resistant, non-responsive, or determined unlikely to respond to a BCL-2 inhibitor.

[0520] In some embodiments, the compounds of the present invention are administered in combination with a second therapeutic agent. In some embodiments, the compounds of the present invention are administered with compounds that inhibit the activity of BCL-2 anti-apoptotic proteins. In some embodiments, the BCL-2 inhibitor is a BH3 mimetic. In some embodiments, the BCL-2 inhibitor is navitoclax (ABT-263), obatoclax (GX15-070), or venetoclax. These methods comprise administering an effective amount of a compound of the invention to a warm blooded animal, including a human. In some embodiments, a pharmaceutical composition provided herein used in the treatment of a BFL-1 over-expressing cancer is administered no more frequently than once daily, no more frequently than every other day, no more frequently than twice weekly, no more frequently than weekly, or no more frequently than every other week.

[0521] In some embodiments, provided herein are methods for treating neurodegenerative disorders. Many neurodegenerative diseases are a result of neurodegenerative processes including progressive loss of structure or function of neurons. These methods comprise administering an effective amount of at least one peptidomimetic macrocycles of the invention or a pharmaceutical composition thereof to a warm blooded animal, including a human. Non limiting neurodegenerative disorders that may be treated by the methods of the present invention include Parkinson's disease, Alzheimer's, Amyotrophic lateral sclerosis (ALS) and Huntington's disease.

[0522] In some embodiments, provided herein are methods for treating cardiac disorders. These methods comprise administering an effective amount of at least one peptidomimetic macrocycles of the invention or a pharmaceutical composition thereof to a warm blooded animal, including a human. Non limiting examples of cardiac disorders that may be treated by the methods of the present invention include coronary heart disease (also known as isohaemic heart disease or coronary artery disease), cardiomyopathy (diseases of cardiac muscle), hypertensive heart disease (diseases of the heart secondary to high blood pressure), heart failure, cor pulmonale (failure of the right side of the heart), cardiac dysrhythmias (abnormalities of heart rhythm), inflammatory heart disease, endocarditis (inflammation of the inner layer of the heart, the endocardium), inflammatory cardiomegaly, myocarditis (inflammation of the myocardium, the muscular part of the heart), valvular heart disease, cerebrovascular disease (disease of blood vessels that supplies to the brain such as stroke), peripheral arterial disease (disease of blood vessels that supplies to the arms and legs), congenital heart disease, and rheumatic heart disease. In some embodiments, the methods of the present invention may be used for the treatment of acute myocardial infarction or chromic ischemic heart disease.

[0523] Also provided herein are methods for promoting cardiac regeneration in a subject in need thereof. These methods comprise administering an effective amount of at least one peptidomimetic macrocycles of the invention or a pharmaceutical composition thereof to a warm blooded animal, including a human.

[0524] In some embodiments, provided herein are methods for treating diabetes or diabetes mellitus. Diabetes is a group of metabolic diseases in which a person has high blood sugar, either because the pancreas does not produce enough insulin, or because cells do not respond to the insulin that is produced. The diabetes may be Type 1 diabetes mellitus, type 2 diabetes, gestational diabetes, congenital diabetes, cystic fibrosis-related diabetes or several forms of monogenic diabetes. Treatment of diabetes may be by islet/beta cell transplantation.

[0525] In another aspect the invention provides methods of treating a subject by administering to the subject a beta cell, wherein the beta cell has been treated with an effective amount of a peptidomimetic macrocycle of the invention or a pharmaceutical composition thereof. Similarly, In another aspect the invention provides methods of treating a subject by administering to the subject a islet cell, wherein the islet cell has been treated with an effective amount of a peptidomimetic macrocycle of the invention or a pharmaceutical composition thereof.

[0526] In some embodiments, provided herein are methods for treating cancer. These methods comprise administering an effective amount of at least one peptidomimetic macrocycles of the invention or a pharmaceutical composition thereof to a warm blooded animal, including a human. Non-limiting examples of cancers that may be treated by the methods of the present invention include breast cancer such as a ductal carcinoma in duct tissue in a mammary gland, medullary carcinomas, colloid carcinomas, tubular carcinomas, and inflammatory breast cancer; ovarian cancer, including epithelial ovarian tumors such as adenocarcinoma in the ovary and an adenocarcinoma that has migrated from the ovary into the abdominal cavity; uterine cancer; cervical cancer such as adenocarcinoma in the cervix epithelial including squamous cell carcinoma and adenocarcinomas; prostate cancer, such as a prostate cancer selected from the following: an adenocarcinoma or an adenocarcinoma that has migrated to the bone; pancreatic cancer such as epithelioid carcinoma in the pancreatic duct tissue and an adenocarcinoma in a pancreatic duct; bladder cancer such as a transitional cell carcinoma in urinary bladder, urothelial carcinomas (transitional cell carcinomas), tumors in the urothelial cells that line the bladder, squamous cell carcinomas, adenocarcinomas, and small cell cancers; leukemia such as acute myeloid leukemia (AML), acute lymphocytic leukemia, chronic lymphocytic leukemia, chronic myeloid leukemia, hairy cell leukemia, myelodysplasia, myeloproliferative disorders, acute myelogenous leukemia (AML), chronic myelogenous leukemia (CML), mastocytosis, chronic lymphocytic leukemia (CLL), multiple myeloma (MM), and myelodysplastic syndrome (MDS); bone cancer; lung cancer such as non-small cell lung cancer (NSCLC), which is divided into squamous cell carcinomas, adenocarcinomas, and large cell undifferentiated carcinomas, and small cell lung cancer; skin cancer such as basal cell carcinoma, melanoma, squamous cell carcinoma and actinic keratosis, which is a skin condition that sometimes develops into squamous cell carcinoma; eye retinoblastoma; cutaneous or intraocular (eye) melanoma; primary liver cancer (cancer that begins in the liver); kidney cancer; thyroid cancer such as papillary, follicular, medullary and anaplastic; AIDS-related lymphoma such as diffuse large B-cell lymphoma, B-cell immunoblastic lymphoma and small non-cleaved cell lymphoma; Kaposi's Sarcoma; viral-induced cancers including hepatitis B virus (HBV), hepatitis C virus (HCV), and hepatocellular carcinoma; human lymphotropic virus-type 1 (HTLV-1) and adult T-cell leukemia/lymphoma; and human papilloma virus (HPV) and cervical cancer; central nervous system cancers (CNS) such as primary brain tumor, which includes gliomas (astrocytoma, anaplastic astrocytoma, or glioblastoma multiforme), Oligodendroglioma, Ependymoma, Meningioma, Lymphoma, Schwannoma, and Medulloblastoma; peripheral nervous system (PNS) cancers such as acoustic neuromas and malignant peripheral nerve sheath tumor (MPNST) including neurofibromas and schwannomas, malignant fibrous cytoma, malignant fibrous histiocytoma, malignant meningioma, malignant mesothelioma, and malignant mixed Müllerian tumor; oral cavity and oropharyngeal cancer such as, hypopharyngeal cancer, laryngeal cancer, nasopharyngeal cancer, and oropharyngeal cancer; stomach cancer such as lymphomas, gastric stromal tumors, and carcinoid tumors; testicular cancer such as germ cell tumors (GCTs), which include seminomas and nonseminomas, and gonadal stromal tumors, which include Leydig cell tumors and Sertoli cell tumors; thymus cancer such as to thymomas, thymic carcinomas, Hodgkin disease, non-Hodgkin lymphomas carcinoids or carcinoid tumors; rectal cancer; and colon cancer.

[0527] In some embodiments, a peptidomimetic macrocycle disclosed herein is administered in combination with an additional therapy to treat a cancer. Non-limiting examples of the additional therapy include surgery, radiation therapy, chemotherapy, or immunotherapy. In some embodiments, the combination of the peptidomimetic macrocycle and surgery is on an adjuvant basis or a neo-adjuvant basis.

[0528] Non-limiting examples of chemotherapy include alkylating agents, angiogenesis inhibitors, antimetabolites, Bcr-Abl kinase inhibitors, cyclin-dependent kinase inhibitors, cyclooxygenase-2 inhibitors, epidermal growth factor receptor (EGFR) inhibitors, leukemia viral oncogene homolog (ErbB2) receptor inhibitors, histone deacetylase (HDAC) inhibitors, heat shock protein (HSP)-90 inhibitors, inhibitors of inhibitors of apoptosis proteins (IAPs), antibody drug conjugates, activators of death receptor pathway, kinesin inhibitors, JAK-2 inhibitors, mitogen-activated extracellular signal-regulated kinase (MEK) inhibitors, mammalian target of rapamycin (mTOR) inhibitors, non-steroidal anti-inflammatory drugs (NSAIDs), platelet-derived growth factor receptor (PDGFR) inhibitors, platinum chemotherapeutics, polo-like kinase (Plk) inhibitors, phosphoinositide-3 kinase (PI3K) inhibitors, thrombospondin analogues, vascular endothelial growth factor receptor (VEGFR) inhibitors, intercalating antibiotics, topoisomerase inhibitors, antibodies, hormonal therapies, deltoids and retinoids, poly ADP (adenosine diphosphate)-ribose polymerase (PARP) inhibitors, plant alkaloids, proteasome inhibitors, biologic response modifiers, pyrimidine analogues, purine analogues, antimitotics, taxanes, and ubiquitin ligase inhibitors.

[0529] Non-limiting examples of alkylating agents include: altretamine, AMD-473, AP-5280, apaziquone, bendamustine, brostallicin, busulfan, carboquone, carmustine, chlorambucil, laromustine, cyclophosphamide, decarbazine, estramustine, fotemustine, glufosfamide, ifosfamide, KW-2170, lomustine, mafosfamide, melphalan, mitobronitol, mitolactol, nimustine, nitrogen mustard N-oxide, ranimustine, temozolomide, thiotepa, bendamustine, treosulfan, and rofosfamide.

[0530] Non-limiting examples of angiogenesis inhibitors include: endothelial-specific receptor tyrosine kinase (Tie-2) inhibitors, epidermal growth factor receptor (EGFR) inhibitors, insulin growth factor-2 receptor (IGFR-2) inhibitors, matrix metalloproteinase-2 (MMP-2) inhibitors, matrix metalloproteinase-9 (MMP-9) inhibitors, platelet-derived growth factor receptor (PDGFR) inhibitors, thrombospondin analogues, and vascular endothelial growth factor receptor tyrosine kinase (VEGFR) inhibitors.

[0531] Non-limiting examples of antimetabolites include: pemetrexed disodium, 5-azacitidine, capecitabine, carmofur, cladribine, clofarabine, cytarabine, cytarabine ocfosfate, cytosine arabinoside, decitabine, deferoxamine, doxifluridine, eflornithine, EICAR, enocitabine, ethnylcytidine, fludarabine, 5-fluorouracil, leucovorin, gemcitabine, hydroxyurea, melphalan, mercaptopurine, 6-mercaptopurine riboside, methotrexate, mycophenolic acid, nelarabine, nolatrexed, ocfosfate, pelitrexol, pentostatin, raltitrexed, Ribavirin, triapine, trimetrexate, S-1, tiazofurin, tegafur, TS-1, vidarabine, and UFT.

[0532] Non-limiting examples of Bcr-Abl kinase inhibitors include: dasatinib, nilotinib, and imatinib.

[0533] Non-limiting examples of CDK inhibitors include: AZD-5438, BMI-1040, BMS-032, BMS-387, CVT-2584, flavopyridol, GPC-286199, MCS-5A, PD0332991, PHA-690509, seliciclib, and ZK-304709.

[0534] Non-limiting examples of COX-2 inhibitors include: ABT-963, etoricoxib, valdecoxib, BMS347070, celecoxib, lumiracoxib, CT-3, deracoxib, JTE-522, 4-methy dimethylphenyl)-1-(4-sulfamoylphenyl-1H-pyrrole), etoricoxib, NS-398, parecoxib, RS-57067, SC-58125, SD-8381, SVT-2016, S-2474. T-614, and rofecoxib.

[0535] Non-limiting examples of EGFR inhibitors include: ABX-EGF, anti-EGFR immunoliposomes, EGF-vaccine, EMD-7200, cetuximab, IgA antibodies, gefitinib, erlotinib, TP-38, EGFR fusion protein, and lapatinib.

[0536] Non-limiting examples of ErbB2 receptor inhibitors include: CP-724-714, canertinib, trastuzumab, lapatinib, petuzumab, TAK-165, ionafarnib, GW-282974, EKB-569, PI-166, dHER2 HER2. vaccine, APC-8024 HER-2 vaccine, anti-HER2/neu bispecific antibody, B7.her2IgG3, AS HER2 trifunctional bispecific antibodies, mAB AR-209, and mAB 2B-1.

[0537] Non-limiting examples of histone deacetylase inhibitors include: depsipeptide, LAQ-824, MS-275, trapoxin, suberoylanilide hydroxamic acid (SAHA), TSA, and valproic acid.

[0538] Non-limiting examples of HSP-90 inhibitors include: 17-AAG-nab, 17-AAG, CNF-101, CNF-1010, CNF-2024, 17-DMAG, geldanamycin, IPI-504, KOS-953, human recombinant antibody to HSP-90, NCS-683664, PU24FC1, PU-3, radicicol, SNX-2112, or STA-9090 VER49009,

[0539] Non-limiting examples of inhibitors of inhibitors of apoptosis proteins include: HGS1029, GDC-0145, GDC-0152, LCL-161, and LBW-242.

[0540] Non-limiting examples of antibody-drug conjugates include: anti-CD22-MC-MMAF, anti-CD22-MC-MMAE, anti-CD22-MCC-DM1, CR-0,1-vcMMAE, PSMA-ADC, MEDI-547, SGN-19Am SGN-35, and SGN-75.

[0541] Non-limiting examples of activators of death receptor pathway include: TRAIL, antibodies or other agents that target TRAIL or death receptors (e.g., DR4 and DR5) such as apomab, conatumumab, ETR2-ST01, GDC0145, lexatumumab, HGS-1029, LBY-135, PRO-1762, and trastuzumab.

[0542] Non-limiting; examples of kinesin inhibitors include: Eg5 inhibitors such as AZD4877, ARRY-520; and CENPE inhibitors such as GSK923295A.

[0543] Non-limiting examples of JAK-2 inhibitors include: lesaurtinib, XL019 or INCB018424.

[0544] Non-limiting examples of MEK inhibitors include: trametinib, ARRY-142886, ARRY-438162 PD-325901, CI-1040, and PD-98059.

[0545] Non-limiting examples of mTOR inhibitors include: AP-23573, CCI-779, everolimus, RAD-001, rapamycin, temsirolimus, ATP-competitive. TORC1/TORC2 inhibitors, comprising P1-103, PP242, PP30, and Torin 1.

[0546] Non-limiting examples of non-steroidal anti-inflammatory drugs include: salsalate, diflunisal, ibuprofen, ketoprofen, nabumetone, piroxicam, ibuprofen cream, naproxen, diclofenac, indomethacin, sulindac, tolmetin, etodolac, ketorolac, and oxaprozin.

[0547] Non-limiting examples of PDGFR inhibitors include: C-451, CP-673, and CP-868596.

[0548] Non-limiting examples of platinum chemotherapeutics include: cisplatin, eptaplatin, lobaplatin, nedaplatin, carboplatin, satraplatin, and picoplatin.

[0549] Non-limiting examples of polo-like kinase inhibitors include: BI-2536.

[0550] Non-limiting examples of phosphoinositide-3 kinase (MK) inhibitors include: wortmannin, LY294002, XL-147, CAL-120, ONC-21, AEZS-127, ETP-45658, PX-866, GDC-0941, BGT226, BEZ235, and XL765.

[0551] Non-limiting examples of thrombospondin analogues include: ABT-510, ABT-567, ABT-898, and TSP-1.

[0552] Non-limiting examples of VEGFR inhibitors include: bevacizumab, ABT-869, AEE-788, ANGIOZYME™ (a ribozyme that inhibits angiogenesis, axitinib, AZD-2171, CP-547,632, IM-862, pegaptamib, sorafenib, pazopanib, vatalanib, sunitinib, VEGF trap, and vandetanib.

[0553] Non-limiting examples of antibiotics include: intercalating antibiotics aclarubicin, actinomycin amrubicin, annamycin, adriamycin, bleomycin, daunorubicin, liposomal doxorubicin, doxorubicin, elsamitrucin, epirbucin, glarbuicin, idarubicin, mitomycin C, nemorubicin, neocarzinostatin, peplomycin, pirarubicin, rebeccamycin, stimalamer, streptozocin, vairubicin, and zinostatin.

[0554] Non-limiting examples of topoisomerase inhibitors include: aclarubicin, 9-aminocamptothecin, amonafide, amsacrine, becatecarin, belotecan, BN-80915, irinotecan, camptothecin, dexrazoxine, diflomotecan, edotecarin, epirubicin, etoposide, exatecan, 10-hydroxycamptothecin, gimatecan, lurtotecan, mitoxantrone, orathecin, pirarbucin, pixantrone, rubitecan, sobuzoxane, SN-38, tafluposide, and topotecan.

[0555] Non-limiting examples of antibodies include: bevacizumab, CD40 antibodies, chTNT-1/B, denosumab, cetuximab, zanolimumab, IGF1R antibodies, lintuzumab, edrecolomab, WX G250, rituximab, ticilimumab, trastuzumab, CD20 antibodies types I and II, pernbrolizumab, nivolumab, rituximab, and panitumumab.

[0556] Non-limiting examples of hormonal therapies include: anastrozole, exemestane, arzoxifene, bicalutamide, cetrorelix, degarelix, deslorelin, trilostane, dexamethasone, flutamide, raloxifene, fadrozole, toremifene, fulvestrant, letrozole, formestane, glucocorticoids, doxercalciferol, sevelamer carbonate, lasofoxifene, leuprolide acetate, megesterol, mifepristone, nilutamide, tamoxifen citrate, abarelix, prednisone, finasteride, rilostane, buserelin, luteinizing hormone releasing hormone (TA-IRA), histrelin implant, trilostane, modrastane, fosrelin, and goserelin.

[0557] Non-limiting examples of deltoids and retinoids include: seocalcitol, lexacalcitrol, fenretinide, aliretinoin, liposomal tretinoin, bexarotene, and LGD-1550.

[0558] Non-limiting examples of PARP inhibitors include: ABT-888, olaparib, KU-59436, AZD-2281 AG-014699, BSI-201, BGP-15, INO-1001, and ONO-2231.

[0559] Non-limiting examples of plant alkaloids include: vincristine, vinblastine, vindesine, and vinorelbine.

[0560] Non-limiting examples of proteasome inhibitors include: bortezomib, carfilzomib, MG132, and NPI-0052.

[0561] Non-limiting examples of biological response modifiers include: krestin, sizofuran, picibanil, PF-3512676, and ubenimex.

[0562] Non-limiting examples of pyrimidine analogues include: cytarabine, cytosine arabinoside, doxifluridine, fludarabine, 5-fluorouracil, floxuridine, gemcitabine, ratitrexed, and triacetvluridine troxacitabine.

[0563] Non-limiting examples of purine analogues include: thioguanine, and mercaptopurine.

[0564] Non-limiting examples of antimitotic agents include: batabulin, epothilone D, N-(2-((4-hydroxyphenyl)amino)pyridin-3-yl)-4-methoxybenzenesulfonamide, ixabepilone, paclitaxel, docetaxel, PNU100940, patupilone, XRP-9881 larotaxel, vinflunine, and epothilone.

[0565] Non-limiting examples of ubiquitin ligase inhibitors include paclitaxel and docetaxel.

[0566] Non-limiting examples of ubiquitin ligase inhibitors include: MDM2 inhibitors, such as nutlins, and NEDD8 inhibitors such as MLN4924.

[0567] Non-limiting examples of immunotherapies include: interferons or immune-enhancing agents. Interferons comprise interferon alpha, interferon alpha-2a, interferon alpha-2h, interferon beta, interferon gamma-1a, interferon gamma-1b, interferon gamma-n1. Other immune-enhancing agents comprise oxidized glutathione, tasonermin, tositumomab, alemtuzumab, CTLA4, decarbazine, denileukin, epratuzumab, lenograstim, lentinan, leukocyte alpha interferon, imiquimod, ipilumimab, melanoma vaccine, mitumomab, molgramostim, nivolumab, pembrolizumab, gemtuzumab ozogamicin, filgrastim, OncoVAC-CL, oregovomab, pemtumomab, sipuleucel-T, sargaramostim, sizofilan, teceleukin, Bacillus Calmette-Guerin, ubenimex, virulizin, Z-100, Tetrachlorodecaoxide (TCDD), aldesleukin, thymalfasin, daclizumab, and 90Y-Ibritumomab tiuxetan.

[0568] While preferred embodiments of the present invention have been shown and described herein, it will be obvious to those skilled in the art that such embodiments are provided by way of example only. Numerous variations, changes, and substitutions will now occur to those skilled in the art without departing from the invention. It should be understood that various alternatives to the embodiments of the invention described herein may be employed in practicing the invention. It is intended that the following claims define the scope of the invention and that methods and structures within the scope of these claims and their equivalents be covered thereby.

### EXAMPLES

### Example 1: Peptidomimetic Macrocycles of the Invention

[0569] Peptidomimetic macrocycles were synthesized, purified and analyzed as previously described and as described below (Schafmeister et al., J. Am. Chem. Soc. 122:5891-5892 (2000); Schafmeister & Verdin, J. Am. Chem. Soc. 122:5891 (2005); Walensky et al., Science 305:1466-1470 (2004); and U.S. Pat. No. 7,192,713). Peptidomimetic macrocycles were designed by replacing two or more naturally occurring amino acids with the corresponding synthetic amino acids. Substitutions were made at i and i+4, and i and i+7 positions. Peptide synthesis was performed either manually or on an automated peptide synthesizer (Applied Biosystems, model 433A), using solid phase conditions, rink amide AM resin (Novabiochem), and Fmoc main-chain protecting group chemistry. For the coupling of natural Fmoc-protected amino acids (Novabiochem), 10 equivalents of amino acid and a 1:1:2 molar ratio of coupling reagents HBTU/HOBt (Novabiochem)/DIEA were employed. Non-natural amino acids (4 equiv) were coupled with a 1:1:2 molar ratio of HATU (Applied Biosystems)/HOBt/DIEA. The N-termini of the synthetic peptides were acetylated, while the C-termini were amidated.

[0570] Purification of cross-linked compounds was achieved by high performance liquid chromatography (HPLC) (Varian ProStar) on a reverse phase C18 column (Varian) to yield the pure compounds. Chemical composition of the pure products was confirmed by LC/MS mass spectrometry (Micromass LCT interfaced with Agilent 1100 HPLC system) and amino acid analysis (Applied Biosystems, model 420A).

### Example 2: Metabolism by Purified Protease

[0571] Linear peptides and cross-linked peptidomimetic macrocycles are tested for stability to proteolysis by Trypsin (MP Biomedicals, Solon OH) by solubilizing each peptide at 10 μM concentration in 200 μL 100 mM NH4OAc (pH 7.5). The reaction is initiated by adding 3.5 μl of Trypsin (12.5 μg protease per 500 μL reaction) and shaking continually in sealed vials while incubating in a Room Temperature (22±2° C.). The enzyme/substrate ratio is 1:102 (w/w). After incubation times of 0, 5, 30, 60 and 135 min the reaction is stopped by addition of equal volume of 0.2% trifluoroacetic acid. Then, the solution is immediately analyzed by LC-MS in positive detection mode. The reaction half-life for each peptide is calculated in GraphPad Prism by a non-linear fit of uncalibrated MS response versus enzyme incubation time.

| SEQ | | | | | | | | | | | | | | | | | | | | | | | | | Calc. | | | | | |
|---|---|---|---|---|---|---|---|---|---|---|---|---|---|---|---|---|---|---|---|---|---|---|---|---|---|---|---|---|---|---|
| ID | | | | | | | | | | | | | | | | | | | | | | | | | (M + 2)/ | Found | EC₅₀ | Ki | Ki | Ki |
| NO: | | | 1 | 2 | 3 | 4 | 5 | 6 | 7 | 8 | 9 | 10 | 11 | 12 | 13 | 14 | 15 | 16 | 17 | 18 | 19 | 20 | 21 | | 2 | mass | (μM)* | MCL-1 | BCL-X_{L} | BCL-2 |
| 1628 | Ac- | | I | W | I | A | Q | A | L | R | $r8 | I | G | D | E | F | N | $ | Y | Y | A | R | R | —NH₂ | 1344.74 | 1345.7 | | 10.6 | 3.9 | 12.9 |
| 1629 | Ac- | | I | W | I | A | Q | E | L | R | $r8 | I | G | D | E | F | N | $ | Y | Y | A | R | R | —NH₂ | 1373.75 | 1373.56 | | | 9.2 | 23.5 |
| 1630 | Ac- | | | W | I | A | Q | A | L | R | $r8 | I | G | D | A | F | N | $ | Y | Y | A | | | —NH₂ | 1103.1 | 1103.12 | | | 212.6 | 423.8 |
| 1631 | Ac- | | | | I | A | Q | A | L | R | $r8 | I | G | D | A | F | A | $ | Y | Y | A | | | —NH₂ | 988.55 | 988.45 | | | 373.6 | 877.5 |
| 1632 | Ac- | | | | I | A | Q | A | L | R | $r8 | I | G | D | A | F | N | $ | Y | A | A | | | —NH₂ | 964.04 | 963.94 | | | >1000 | >1000 |
| 1633 | Ac- | | I | W | I | A | Q | A | L | R | $r8 | I | G | D | A | F | N | $ | Y | Y | A | | | —NH₂ | 1159.64 | 1159.87 | 6.6 | 8.4 | 22.4 | 84.8 |
| 1634 | Ac- | | | W | I | A | Q | A | L | R | $r8 | I | G | D | A | F | N | $ | Y | Y | A | | | —NH₂ | 1103.1 | 1102.94 | | | | 410.2 |
| 1635 | Ac- | | | | I | A | Q | A | L | R | $r8 | I | G | D | A | F | N | $ | Y | Y | A | | | —NH₂ | 1010.06 | 1009.9 | | | 308.6 | 519.2 |
| 1636 | Ac- | | | | I | A | A | A | L | R | $r8 | I | G | D | A | F | N | $ | Y | Y | A | | | —NH₂ | 981.55 | 981.86 | | | 255.9 | 318.7 |
| 1637 | Ac- | | | | I | A | Q | A | L | A | $r8 | I | G | D | A | F | N | $ | Y | Y | A | | | —NH₂ | 967.53 | 967.45 | | | >1000 | >1000 |
| 1638 | Ac- | | | | I | A | Q | A | L | R | $r8 | I | A | D | A | F | N | $ | Y | Y | A | | | —NH₂ | 1017.07 | 1016.93 | | | 243.1 | 272.5 |
| 1639 | Ac- | | | | I | A | Q | A | L | R | $r8 | I | G | D | A | A | N | $ | Y | Y | A | | | —NH₂ | 972.04 | 971.89 | | | >1000 | >1000 |
| 1640 | Ac- | | | | I | A | Q | A | L | R | $r8 | I | G | D | A | F | N | $ | A | Y | A | | | —NH₂ | 964.04 | 963.94 | | | 471.5 | 803.9 |
| 1641 | Ac- | | I | $ | I | A | Q | $ | L | R | $r8 | I | G | D | E | F | N | $ | Y | Y | A | | | —NH₂ | 1185.17 | 1185.61 | >40 | 19.5 | 11.6 | 8.7 |
| 1642 | Ac- | | I | W | I | A | Q | A | L | R | % r8 | I | G | D | A | F | N | % | Y | Y | A | | | —NH₂ | 1160.14 | 1161.28 | | | | |
| 1643 | Ac- | | I | W | I | A | Q | A | L | R | $r8 | I | G | D | E | F | A | $ | Y | Y | A | | | —NH₂ | 1167.14 | 1168.2 | | 7.0 | 15.4 | 21.9 |
| 1644 | Ac- | | I | W | I | A | Q | A | L | R | $r8 | I | G | D | Q | A | N | $ | Y | Y | A | | | —NH₂ | 1150.13 | 1151.09 | | | | |
| 1645 | FITC- | Ba | I | W | I | A | Q | A | L | R | $r8 | I | G | D | A | F | N | $ | Y | Y | A | | | —NH₂ | 1368.67 | 1369.79 | | ND | ND | ND |
| 1646 | 5- | Ba | I | W | I | A | Q | A | L | R | $r8 | I | G | D | A | F | N | $ | Y | Y | A | | | —NH₂ | 1353.18 | 1354.13 | | ND | ND | ND |
| | FAM- | | | | | | | | | | | | | | | | | | | | | | | | | | | | | |
| 1647 | 5- | Ba | I | W | I | A | Q | A | L | R | $r8 | I | G | D | E | F | N | $ | Y | Y | A | | | —NH₂ | 1382.18 | 1382.99 | | ND | ND | ND |
| | FAM- | | | | | | | | | | | | | | | | | | | | | | | | | | | | | |
| 1648 | Ac- | | I | A | I | A | Q | A | L | R | $r8 | I | G | D | A | F | N | $ | Y | Y | A | | | —NH₂ | 1102.12 | 1103.17 | | 19.7 | 22.3 | 37.7 |
| 1649 | Ac- | | I | W | I | A | Q | A | L | R | $r8 | I | G | D | E | F | N | $ | Y | Y | A | | | —NH₂ | 1188.64 | 1189.57 | >40 | 1.8 | 1.4 | 3.2 |
| 1650 | Ac- | | I | W | I | A | Q | A | L | R | $r8 | I | G | D | Q | F | N | $ | Y | Y | A | | | —NH₂ | 1188.15 | 1189.1 | | 5.2 | 12.0 | 67.0 |
| 1651 | Ac- | | I | W | I | A | A | A | L | R | $r8 | I | G | D | E | F | N | $ | Y | Y | A | | | —NH₂ | 1160.13 | 1161.17 | | 1.0 | 1.0 | 6.0 |
| 1652 | Ac- | | I | W | I | A | A | A | L | R | $r8 | I | G | D | Q | F | N | $ | Y | Y | A | | | —NH₂ | 1159.64 | 1160.34 | | 6.0 | 4.0 | 22.0 |
| 1653 | Ac- | | I | W | I | A | A | A | L | R | $r8 | I | G | D | A | F | N | $ | Y | Y | A | | | —NH₂ | 1131.13 | 1132.12 | | 6.7 | 25.6 | 65.4 |
| 1654 | Ac- | | I | W | I | A | Q | A | L | R | $r8 | I | G | D | A | F | A | $ | Y | Y | A | | | —NH₂ | 1138.14 | 1139.15 | | 7.4 | 55.7 | 114.6 |
| 1655 | Ac- | | I | W | I | A | Q | A | L | Cit | $r8 | I | G | D | A | F | N | $ | Y | Y | A | | | —NH₂ | 1160.13 | 1160.98 | 9.1 | 7.5 | 109.0 | 211.6 |
| 1656 | Ac- | | I | W | I | A | Q | A | L | Cit | $r8 | I | G | D | Q | F | N | $ | Y | Y | A | | | —NH₂ | 1188.64 | 1189.66 | | 1.7 | 28.8 | 88.2 |
| 1657 | Ac- | | I | W | I | A | Q | A | L | H | $r8 | I | G | D | A | F | N | $ | Y | Y | A | | | —NH₂ | 1150.12 | 1151.09 | | >1000 | >1000 | >1000 |
| 1658 | Ac- | | I | W | I | A | Q | A | L | H | $r8 | I | G | D | Q | F | N | $ | Y | Y | A | | | —NH₂ | 1178.63 | 1179.67 | | >1000 | >1000 | >1000 |
| 1659 | Ac- | | I | W | I | A | Q | A | L | Q | $r8 | I | G | D | A | F | N | $ | Y | Y | A | | | —NH₂ | 1145.62 | 1146.55 | | 76.2 | 325.4 | 364.7 |
| 1660 | Ac- | | I | W | I | A | Q | A | L | Q | $r8 | I | G | D | Q | F | N | $ | Y | Y | A | | | —NH₂ | 1174.13 | 1175.14 | | 14.8 | 6.3 | 27.5 |
| 1661 | Ac- | | I | W | I | A | Q | A | L | R | $r8 | I | G | D | A | A | N | $ | Y | Y | A | | | —NH₂ | 1121.62 | 1122.5 | | 7.5 | 401.7 | 139.7 |
| 1662 | Ac- | | I | W | I | A | Q | A | L | R | $r8 | I | G | D | A | I | N | $ | Y | Y | A | | | —NH₂ | 1142.65 | 1143.59 | | 3.4 | 14.1 | 113.0 |
| 1663 | Ac- | | I | W | I | A | Q | A | L | R | $r8 | I | G | D | Q | I | N | $ | Y | Y | A | | | —NH₂ | 1171.16 | 1171.9 | | | | |
| 1664 | Ac- | | I | W | I | A | Q | A | A | R | $r8 | I | G | D | A | A | N | $ | Y | Y | A | | | —NH₂ | 1100.6 | 1101.5 | | 177.0 | 154.0 | 502.0 |
| 1665 | Ac- | | I | W | I | A | Q | A | L | R | $r8 | I | A | D | A | F | N | $ | Y | Y | A | | | —NH₂ | 1166.65 | 1167.83 | | 96.3 | 7.7 | 84.0 |
| 1666 | Ac- | | I | W | I | A | Q | A | L | R | $r8 | I | A | D | Q | F | N | $ | Y | Y | A | | | —NH₂ | 1195.16 | 1196.23 | | 116.2 | 7.7 | 25.6 |
| 1667 | Ac- | | I | W | I | A | Q | A | L | R | $r8 | A | G | D | A | F | N | $ | Y | Y | A | | | —NH₂ | 1138.62 | 1139.61 | | 182.7 | 18.1 | 59.6 |
| 1668 | Ac- | | I | W | I | A | Q | A | L | R | $r8 | A | G | D | Q | F | N | $ | Y | Y | A | | | —NH₂ | 1167.13 | 1168.11 | | 122.1 | 1.9 | 4.8 |
| 1669 | Ac- | | I | W | I | A | Q | A | L | R | $r8 | F | G | D | A | F | N | $ | Y | Y | A | | | —NH₂ | 1176.63 | 1177.63 | | 27.8 | 15.8 | 68.5 |
| 1670 | Ac- | | I | W | I | A | Q | A | L | R | $r8 | F | G | D | Q | F | N | $ | Y | Y | A | | | —NH₂ | 1205.14 | 1205.94 | | 74.1 | 25.6 | 66.1 |
| 1671 | Ac- | | I | W | F | A | Q | A | L | R | $r8 | I | G | D | A | F | N | $ | Y | Y | A | | | —NH₂ | 1176.63 | 1177.63 | | 22.0 | 28.0 | 179.4 |
| 1672 | Ac- | | I | W | F | A | Q | A | L | R | $r8 | I | G | D | Q | F | N | $ | Y | Y | A | | | —NH₂ | 1205.14 | 1206.13 | | 29.3 | 25.9 | 204.6 |
| 1673 | Ac- | | I | W | I | A | Q | A | L | A | $r8 | I | G | D | A | F | N | $ | Y | Y | A | | | —NH₂ | 1117.11 | 1118.15 | | 73.8 | 386.4 | >1000 |
| 1674 | Ac- | | I | W | I | A | Q | A | L | R | $r8 | I | G | N | A | F | N | $ | Y | Y | A | | | —NH₂ | 1159.15 | 1159.63 | | 194.7 | 416.0 | 404.9 |
| 1675 | Ac- | | I | W | I | A | Q | A | A | R | $r8 | I | G | D | A | F | N | $ | Y | Y | A | | | —NH₂ | 1138.62 | 1139.2 | | >1000 | >1000 | >1000 |
| 1676 | Ac- | | I | W | I | A | Q | A | L | R | $r8 | I | G | D | Q | F | A | $ | Y | Y | A | | | —NH₂ | 1166.65 | 1167.3 | | 22.8 | 53.5 | 84.9 |
| 1677 | Ac- | | I | W | Cha | A | Q | A | L | R | $r8 | I | G | D | A | F | N | $ | Y | Y | A | | | —NH₂ | 1179.65 | 1180.15 | 3.9 | 43.8 | 14.4 | 104.9 |
| 1678 | Ac- | | I | W | hhL | A | Q | A | L | R | $r8 | I | G | D | A | F | N | $ | Y | Y | A | | | —NH₂ | 1173.65 | 1174.39 | 5.7 | 21.2 | 11.9 | 160.7 |
| 1679 | Ac- | | I | W | Adm | A | Q | A | L | R | $r8 | I | G | D | A | F | N | $ | Y | Y | A | | | —NH₂ | 1198.66 | 1199.28 | | 21.6 | 7.3 | 59.0 |
| 1680 | Ac- | | I | W | hCha | A | Q | A | L | R | $r8 | I | G | D | A | F | N | $ | Y | Y | A | | | —NH₂ | 1186.66 | 1186.98 | | 22.2 | 13.1 | 182.3 |
| 1681 | Ac- | | I | W | hF | A | Q | A | L | R | $r8 | I | G | D | A | F | N | $ | Y | Y | A | | | —NH₂ | 1183.64 | 1184.48 | 7.2 | 53.1 | 69.7 | 221.2 |
| 1682 | Ac- | | I | W | Igl | A | Q | A | L | R | $r8 | I | G | D | A | F | N | $ | Y | Y | A | | | —NH₂ | 1190.65 | 1190.41 | 5.9 | 12.8 | 145.5 | 246.4 |
| 1683 | Ac- | | I | W | F4CF3 | A | Q | A | L | R | $r8 | I | G | D | A | F | N | $ | Y | Y | A | | | —NH₂ | 1210.62 | 1211.31 | | 76.7 | 9.1 | 237.0 |
| 1684 | Ac- | | I | W | F4tBu | A | Q | A | L | R | $r8 | I | G | D | A | F | N | $ | Y | Y | A | | | —NH₂ | 1204.66 | 1205.39 | | 150.8 | 16.9 | >1000 |
| 1685 | Ac- | | I | W | 2Nal | A | Q | A | L | R | $r8 | I | G | D | A | F | N | $ | Y | Y | A | | | —NH₂ | 1201.64 | 1202.2 | 4.8 | 163.2 | 151.1 | 264.6 |
| 1686 | Ac- | | I | W | Bip | A | Q | A | L | R | $r8 | I | G | D | A | F | N | $ | Y | Y | A | | | —NH₂ | 1214.65 | 1215.43 | 6.4 | 11.0 | 3.0 | >1000 |
| 1687 | Ac- | | I | W | I | A | Q | A | Cha | R | $r8 | I | G | D | A | F | N | $ | Y | Y | A | | | —NH₂ | 1179.65 | 1180.22 | | 4.2 | 81.1 | >1000 |
| 1688 | Ac- | | I | W | I | A | Q | A | hhL | R | $r8 | I | G | D | A | F | N | $ | Y | Y | A | | | —NH₂ | 1173.65 | 1174.4 | | 3.1 | 135.9 | 231.4 |
| 1689 | Ac- | | I | W | I | A | Q | A | Adm | R | $r8 | I | G | D | A | F | N | $ | Y | Y | A | | | —NH₂ | 1198.66 | 1199.05 | 0.5 | 40.2 | 109.5 | >1000 |
| 1690 | Ac- | | I | W | I | A | Q | A | hCha | R | $r8 | I | G | D | A | F | N | $ | Y | Y | A | | | —NH₂ | 1186.66 | 1187.25 | | 3.8 | >1000 | >1000 |
| 1691 | Ac- | | I | W | I | A | Q | A | hAdm | R | $r8 | I | G | D | A | F | N | $ | Y | Y | A | | | —NH₂ | 1205.67 | 1206.4 | | 16.6 | >1000 | 240.3 |
| 1692 | Ac- | | I | W | I | A | Q | A | hF | R | $r8 | I | G | D | A | F | N | $ | Y | Y | A | | | —NH₂ | 1183.64 | 1184.29 | | 7.5 | >1000 | >1000 |
| 1693 | Ac- | | I | W | I | A | Q | A | Igl | R | $r8 | I | G | D | A | F | N | $ | Y | Y | A | | | —NH₂ | 1190.65 | 1190.4 | | 47.7 | 146.7 | >1000 |
| 1694 | Ac- | | I | W | I | A | Q | A | F4CF3 | R | $r8 | I | G | D | A | F | N | $ | Y | Y | A | | | —NH₂ | 1210.62 | 1210.94 | | 188.1 | 10.8 | >1000 |
| 1695 | Ac- | | I | W | I | A | Q | A | F4tBu | R | $r8 | I | G | D | A | F | N | $ | Y | Y | A | | | —NH₂ | 1204.66 | 1205.29 | | 169.0 | 12.7 | 288.0 |
| 1696 | Ac- | | I | W | I | A | Q | A | 2Nal | R | $r8 | I | G | D | A | F | N | $ | Y | Y | A | | | —NH₂ | 1201.64 | 1202.15 | | 119.7 | 17.3 | 234.4 |
| 1697 | Ac- | | I | W | I | A | Q | A | Bip | R | $r8 | I | G | D | A | F | N | $ | Y | Y | A | | | —NH₂ | 1214.65 | 1214.91 | | 83.7 | 8.0 | 280.1 |
| 1698 | Ac- | | I | W | I | A | Q | A | L | R | $r8 | Cba | G | D | A | F | N | $ | Y | Y | A | | | —NH₂ | 1165.64 | 1166.07 | | 26.6 | 27.5 | 89.0 |
| 1699 | Ac- | | I | W | I | A | Q | A | L | R | $r8 | hL | G | D | A | F | N | $ | Y | Y | A | | | —NH₂ | 1166.65 | 1167.37 | | 13.0 | 6.0 | 12.7 |
| 1700 | Ac- | | I | W | I | A | Q | A | L | R | $r8 | Cha | G | D | A | F | N | $ | Y | Y | A | | | —NH₂ | 1179.65 | 1180.22 | | 15.9 | 7.1 | 109.1 |
| 1701 | Ac- | | I | W | I | A | Q | A | L | R | $r8 | Tba | G | D | A | F | N | $ | Y | Y | A | | | —NH₂ | 1166.65 | 1167.18 | | 13.7 | 35.4 | 227.1 |
| 1702 | Ac- | | I | W | I | A | Q | A | L | R | $r8 | hhL | G | D | A | F | N | $ | Y | Y | A | | | —NH₂ | 1173.65 | 1173.93 | | 34.6 | 4.0 | 23.1 |
| 1703 | Ac- | | I | AmW | I | A | Q | A | L | R | $r8 | I | G | D | A | F | N | $ | Y | Y | A | | | —NH₂ | 1166.65 | 1167.18 | | 9.9 | 17.4 | 70.6 |
| 1704 | Ac- | | I | Aib | I | A | Q | A | L | R | $r8 | I | G | D | A | F | N | $ | Y | Y | A | | | —NH₂ | 1109.13 | 1109.46 | | 42.5 | 83.5 | 97.9 |
| 1705 | Ac- | | AmL | W | I | A | Q | A | L | R | $r8 | I | G | D | A | F | N | $ | Y | Y | A | | | —NH₂ | 1166.65 | 1167.27 | | 5.2 | 8.4 | 48.3 |
| 1706 | Ac- | | I | W | AmL | A | Q | A | L | R | $r8 | I | G | D | A | F | N | $ | Y | Y | A | | | —NH₂ | 1166.65 | 1137.37 | | 19.8 | 7.2 | 24.8 |
| 1707 | Ac- | | I | W | I | Aib | Q | A | L | R | $r8 | I | G | AmD | A | F | N | $ | Y | Y | A | | | —NH₂ | 1173.65 | 1173.93 | | >1000 | >1000 | >1000 |
| 1708 | Ac- | | I | W | I | A | Aib | A | L | R | $r8 | I | G | D | A | F | N | $ | Y | Y | A | | | —NH₂ | 1138.14 | 1138.32 | | 5.5 | 59.0 | 120.1 |
| 1709 | Ac- | | I | W | I | A | Q | A | L | R | $r8 | I | G | AmD | A | F | N | $ | Y | Y | A | | | —NH₂ | 1166.65 | 1167.37 | >40 | >1000 | 15.5 | >1000 |
| 1710 | Ac- | | I | W | I | A | Q | A | L | R | $r8 | I | G | D | A | F | N | $ | Y | F4F | A | | | —NH₂ | 1160.64 | 1161.45 | 2.1 | 4.8 | 9.5 | 91.8 |
| 1711 | Ac- | | I | W | Tba | A | Q | A | L | R | $r8 | I | G | D | A | F | N | $ | Y | Y | A | | | —NH₂ | 1166.65 | 1167.37 | | 10.9 | 17.2 | 36.6 |
| 1712 | Ac- | | I | W | hL | A | Q | A | L | R | $r8 | I | G | D | A | F | N | $ | Y | Y | A | | | —NH₂ | 1166.65 | 1167.37 | | 3.7 | 17.0 | 36.5 |
| 1713 | Ac- | | I | W | Chg | A | Q | A | L | R | $r8 | I | G | D | A | F | N | $ | Y | Y | A | | | —NH₂ | 1172.65 | 1173.47 | | 4.6 | 20.9 | 38.9 |
| 1714 | Ac- | | I | W | Ac6c | A | Q | A | L | R | $r8 | I | G | D | A | F | N | $ | Y | Y | A | | | —NH₂ | 1165.64 | 1166.44 | | 10.4 | 7.7 | 25.7 |
| 1715 | Ac- | | I | W | Ac5c | A | Q | A | L | R | $r8 | I | G | D | A | F | N | $ | Y | Y | A | | | —NH₂ | 1158.63 | 1159.32 | | 8.9 | 8.4 | 68.2 |
| 1716 | Ac- | | E | W | I | A | A | A | L | R | $r8 | I | G | D | A | F | N | $ | Y | Y | A | | | —NH₂ | 1139.11 | 1139.52 | | 2.2 | 72.0 | 117.8 |
| 1717 | Ac- | | R | W | I | A | A | A | L | R | $r8 | I | G | D | A | F | N | $ | Y | Y | A | | | —NH₂ | 1152.64 | 1153.49 | | 4.5 | 32.8 | 47.8 |
| 1718 | Ac- | | K | W | I | A | A | A | L | R | $r8 | I | G | D | A | F | N | $ | Y | Y | A | | | —NH₂ | 1138.63 | 1138.97 | | 3.9 | 27.2 | 49.7 |
| 1719 | Ac- | | H | W | I | A | A | A | L | R | $r8 | I | G | D | A | F | N | $ | Y | Y | A | | | —NH₂ | 1143.12 | 1143.87 | | 3.6 | 25.2 | 52.0 |
| 1720 | Ac- | | S | W | I | A | A | A | L | R | $r8 | I | G | D | A | F | N | $ | Y | Y | A | | | —NH₂ | 1118.1 | 1118.8 | | 3.9 | 33.4 | 53.2 |
| 1721 | Ac- | | Q | W | I | A | A | A | L | R | $r8 | I | G | D | A | F | N | $ | Y | Y | A | | | —NH₂ | 1138.62 | 1139.24 | | 4.8 | 35.9 | 64.9 |
| 1722 | Ac- | | A | W | I | A | A | A | L | R | $r8 | I | G | D | A | F | N | $ | Y | Y | A | | | —NH₂ | 1110.1 | 1110.75 | | 3.8 | 32.6 | 63.9 |
| 1723 | Ac- | | Aib | W | I | A | A | A | L | R | $r8 | I | G | D | A | F | N | $ | Y | Y | A | | | —NH₂ | 1117.11 | 1117.78 | | 4.0 | 20.3 | 56.0 |
| 1724 | Ac- | | F | W | I | A | A | A | L | R | $r8 | I | G | D | A | F | N | $ | Y | Y | A | | | —NH₂ | 1148.12 | 1148.96 | | 6.2 | 33.9 | 76.7 |
| 1725 | Ac- | | I | D | I | A | A | A | L | R | $r8 | I | G | D | A | F | N | $ | Y | Y | A | | | —NH₂ | 1095.6 | 1096.32 | | 3.0 | 36.3 | 41.1 |
| 1726 | Ac- | | I | R | I | A | A | A | L | R | $r8 | I | G | D | A | F | N | $ | Y | Y | A | | | —NH₂ | 1116.14 | 1116.95 | | 9.8 | 20.5 | 39.1 |
| 1727 | Ac- | | I | H | I | A | A | A | L | R | $r8 | I | G | D | A | F | N | $ | Y | Y | A | | | —NH₂ | 1106.62 | 1107.24 | | 6.6 | 19.5 | 43.0 |
| 1728 | Ac- | | I | S | I | A | A | A | L | R | $r8 | I | G | D | A | F | N | $ | Y | Y | A | | | —NH₂ | 1081.6 | 1181.98 | | 15.3 | 56.2 | 89.5 |
| 1729 | Ac- | | I | N | I | A | A | A | L | R | $r8 | I | G | D | A | F | N | $ | Y | Y | A | | | —NH₂ | 1095.11 | 1095.58 | | 11.2 | 37.3 | 62.5 |
| 1730 | Ac- | | I | L | I | A | A | A | L | R | $r8 | I | G | D | A | F | N | $ | Y | Y | A | | | —NH₂ | 1094.63 | 1095.3 | | 10.2 | 71.8 | 125.6 |
| 1731 | Ac- | | I | F | I | A | A | A | L | R | $r8 | I | G | D | A | F | N | $ | Y | Y | A | | | —NH₂ | 1111.62 | 1112.33 | | 10.2 | 45.3 | 95.9 |
| 1732 | Ac- | | I | 2Nal | I | A | A | A | L | R | $r8 | I | G | D | A | F | N | $ | Y | Y | A | | | —NH₂ | 1136.63 | 1137.3 | | 13.7 | 55.3 | 144.3 |
| 1733 | Ac- | | I | W | I | S | A | A | L | R | $r8 | I | G | D | A | F | N | $ | Y | Y | A | | | —NH₂ | 1139.13 | 1139.89 | | 3.6 | 67.8 | 117.2 |
| 1734 | Ac- | | I | W | I | L | A | A | L | R | $r8 | I | G | D | A | F | N | $ | Y | Y | A | | | —NH₂ | 1152.15 | 1152.94 | | 19.7 | 96.2 | 170.5 |
| 1735 | Ac- | | I | W | I | F | A | A | L | R | $r8 | I | G | D | A | F | N | $ | Y | Y | A | | | —NH₂ | 1169.14 | 1169.86 | | 17.2 | 109.9 | 125.0 |
| 1736 | Ac- | | I | W | I | A | L | A | L | R | $r8 | I | G | D | A | F | N | $ | Y | Y | A | | | —NH₂ | 1152.15 | 1152.84 | | 11.6 | 37.9 | 75.8 |
| 1737 | Ac- | | I | W | I | A | A | A | L | K | $r8 | I | G | D | A | F | N | $ | Y | Y | A | | | —NH₂ | 1117.13 | 1117.97 | | 23.2 | 11.7 | 25.6 |
| 1738 | Ac- | | I | W | I | A | A | A | L | R | $r8 | I | Abu | D | A | F | N | $ | Y | Y | A | | | —NH₂ | 1145.14 | 1145.9 | | 106.2 | 112.2 | 130.6 |
| 1739 | Ac- | | I | W | I | A | A | A | L | R | $r8 | I | V | D | A | F | N | $ | Y | Y | A | | | —NH₂ | 1152.15 | 1152.94 | | 104.3 | 139.5 | 119.8 |
| 1740 | Ac- | | I | W | I | A | A | A | L | R | $r8 | I | G | E | A | F | N | $ | Y | Y | A | | | —NH₂ | 1138.14 | 1138.87 | | 63.6 | 135.4 | 141.9 |
| 1741 | Ac- | | I | W | I | A | A | A | L | R | $r8 | I | G | D | A | G | N | $ | Y | Y | A | | | —NH₂ | 1086.1 | 1086.89 | | 29.7 | 171.4 | 145.1 |
| 1742 | Ac- | | I | W | I | A | Q | A | L | R | $r8 | I | G | D | A | W | N | $ | Y | Y | A | | | —NH₂ | 1179.14 | 1180.04 | | 2.3 | 14.5 | 17.7 |
| 1743 | Ac- | | I | W | I | A | Q | A | L | R | $r8 | I | G | D | A | hF | N | $ | Y | Y | A | | | —NH₂ | 1166.65 | 1167.46 | | 2.7 | 16.6 | 38.9 |
| 1744 | Ac- | | I | W | I | A | Q | A | L | R | $r8 | I | G | D | A | F4CF3 | N | $ | Y | Y | A | | | —NH₂ | 1193.63 | 1194.38 | | 8.2 | 107.4 | 103.8 |
| 1745 | Ac- | | I | W | I | A | Q | A | L | R | $r8 | I | G | D | A | F4tBu | N | $ | Y | Y | A | | | —NH₂ | 1187.67 | 1188.36 | | 21.2 | 154.1 | 158.3 |
| 1746 | Ac- | | I | W | I | A | Q | A | L | R | $r8 | I | G | D | A | 2Nal | N | $ | Y | Y | A | | | —NH₂ | 1184.65 | 1185.5 | | 4.4 | 19.1 | 35.1 |
| 1747 | Ac- | | I | W | I | A | Q | A | L | R | $r8 | I | G | D | A | Bip | N | $ | Y | Y | A | | | —NH₂ | 1197.65 | 1198.54 | | 6.5 | 100.2 | 113.5 |
| 1748 | Ac- | | I | W | I | A | A | A | L | R | $r8 | I | G | D | A | F | D | $ | Y | Y | A | | | —NH₂ | 1131.62 | 1132.4 | | 1.5 | 25.9 | 35.3 |
| 1749 | Ac- | | I | W | I | A | A | A | L | R | $r8 | I | G | D | A | F | E | $ | Y | Y | A | | | —NH₂ | 1138.63 | 1139.02 | | 1.8 | 17.9 | 30.7 |
| 1750 | Ac- | | I | W | I | A | A | A | L | R | $r8 | I | G | D | A | F | Q | $ | Y | Y | A | | | —NH₂ | 1138.14 | 1138.84 | | 4.9 | 36.5 | 71.6 |
| 1751 | Ac- | | I | W | I | A | A | A | L | R | $r8 | I | G | D | A | F | S | $ | Y | Y | A | | | —NH₂ | 1117.62 | 1118.5 | | 8.0 | 44.1 | 67.5 |
| 1752 | Ac- | | I | W | I | A | A | A | L | R | $r8 | I | G | D | A | F | H | $ | Y | Y | A | | | —NH₂ | 1142.64 | 1143.25 | | 8.0 | 36.3 | 57.4 |
| 1753 | Ac- | | I | W | I | A | A | A | L | R | $r8 | I | G | D | A | F | N | $ | L | Y | A | | | —NH₂ | 1106.14 | 1107.05 | | 17.6 | 69.9 | 124.9 |
| 1754 | Ac- | | I | W | I | A | Q | A | L | R | $r8 | I | G | D | A | F | N | $ | Y | A | A | | | —NH₂ | 1113.63 | 1114.27 | | 20.3 | 51.8 | 102.0 |
| 1755 | Ac- | | I | W | I | A | Q | A | L | R | $r8 | I | G | D | A | F | N | $ | Y | L | A | | | —NH₂ | 1134.65 | 1135.33 | | 23.4 | 9.0 | 18.9 |
| 1756 | Ac- | | I | W | I | A | Q | A | L | R | $r8 | I | G | D | A | F | N | $ | Y | Cha | A | | | —NH₂ | 1154.66 | 1155.31 | | 24.1 | 8.6 | 28.9 |
| 1757 | Ac- | | I | W | I | A | Q | A | L | R | $r8 | I | G | D | A | F | N | $ | Y | hF | A | | | —NH₂ | 1158.65 | 1159.5 | | 8.0 | 12.1 | 30.7 |
| 1758 | Ac- | | I | W | I | A | Q | A | L | R | $r8 | I | G | D | A | F | N | $ | Y | W | A | | | —NH₂ | 1171.15 | 1171.78 | | 3.9 | 15.4 | 23.5 |
| 1759 | Ac- | | I | W | I | A | Q | A | L | R | $r8 | I | G | D | A | F | N | $ | Y | 2Nal | A | | | —NH₂ | 1176.65 | 1177 | | 8.0 | 26.1 | 65.2 |
| 1760 | Ac- | | I | W | I | A | A | A | L | R | $r8 | I | G | D | A | F | N | $ | Y | Y | D | | | —NH₂ | 1153.12 | 1153.77 | | 2.2 | 116.4 | 137.9 |
| 1761 | Ac- | | I | W | I | A | A | A | L | R | $r8 | I | G | D | A | F | N | $ | Y | Y | E | | | —NH₂ | 1160.13 | 1160.8 | | 1.4 | 45.4 | 56.4 |
| 1762 | Ac- | | I | W | I | A | A | A | L | R | $r8 | I | G | D | A | F | N | $ | Y | Y | Q | | | —NH₂ | 1159.64 | 1160.26 | | 4.6 | 41.1 | 64.7 |
| 1763 | Ac- | | I | W | I | A | A | A | L | R | $r8 | I | G | D | A | F | N | $ | Y | Y | S | | | —NH₂ | 1139.13 | 1139.47 | | 4.7 | 36.0 | 62.4 |
| 1764 | Ac- | | I | W | I | A | A | A | L | R | $r8 | I | G | D | A | F | N | $ | Y | Y | H | | | —NH₂ | 1164.14 | 1165.05 | | 10.6 | 73.8 | 98.8 |
| 1765 | Ac- | | I | W | I | A | A | A | L | R | $r8 | I | G | D | A | F | N | $ | Y | Y | R | | | —NH₂ | 1173.66 | 1174.4 | | 18.5 | 185.9 | 141.8 |
| 1766 | Ac- | | I | W | I | A | A | A | L | R | $r8 | I | G | D | A | F | N | $ | Y | Y | K | | | —NH₂ | 1159.66 | 1160.26 | | 6.6 | 66.3 | 43.4 |
| 1767 | Ac- | | I | W | I | A | Q | A | AmL | R | $r8 | I | G | D | A | F | N | $ | Y | Y | A | | | —NH₂ | 1166.65 | 1167.18 | 0.98 | 86.6 | >1000 | >1000 |
| 1768 | Ac- | | I | W | I | A | Q | A | L | R | $r8 | I | G | AmD | A | F | N | $ | Y | Y | A | | | —NH₂ | 1166.65 | 1167.46 | 15.2 | >1000 | 205.5 | >1000 |
| 1769 | Ac- | | I | W | I | A | Q | A | L | R | $r8 | I | G | D | A | F | N | $ | F4F | Y | A | | | —NH₂ | 1160.64 | 1161.26 | 1.4 | 14.9 | 26.0 | 199.8 |
| 1770 | Ac- | | I | W | I | A | Q | A | L | R | $r8 | I | G | D | A | F | N | $ | Y | Y | Aib | | | —NH₂ | 1166.65 | 1167.46 | 4.6 | 29.0 | >1000 | 218.1 |
| 1771 | Ac- | | I | W | I | A | Q | A | A | Cit | $r8 | I | G | D | A | F | N | $ | Y | Y | A | | | —NH₂ | 1139.11 | 1139.71 | 15.3 | >1000 | 85.0 | >1000 |
| 1772 | Ac- | | I | W | I | A | Q | A | L | Cit | $r8 | I | G | N | A | F | N | $ | Y | Y | A | | | —NH₂ | 1159.64 | 1160.4 | 5.0 | >1000 | >1000 | >1000 |
| 1773 | Ac- | | I | W | I | A | Q | A | L | Cit | $r8 | I | G | D | A | A | N | $ | Y | Y | A | | | —NH₂ | 1122.12 | 1122.87 | 19.3 | 39.5 | >1000 | >1000 |
| 1774 | Ac- | | I | W | I | A | Q | A | L | Cit | $r8 | I | G | D | A | V | N | $ | Y | Y | A | | | —NH₂ | 1136.13 | 1136.47 | 5.8 | 0.8 | >1000 | >1000 |
| 1775 | Ac- | | I | W | I | A | Q | A | L | R | $r8 | I | G | D | A | F | N | $ | A | Y | A | | | —NH₂ | 1113.63 | 1113.9 | 4.0 | 5.3 | 12.6 | 111.6 |
| 1776 | Ac- | | I | W | I | A | Q | A | L | R | $r8 | hL | G | D | A | F | N | $ | F4F | Y | A | | | —NH₂ | 1167.64 | 1168.57 | 1.0 | 58.0 | 43.0 | |
| 1777 | Ac- | | I | W | I | A | Q | A | L | R | $r8 | hL | G | D | A | F | N | $ | Y | F4F | A | | | —NH₂ | 1167.64 | 1168.2 | 0.7 | 27.0 | 13.0 | |
| 1778 | Ac- | | I | W | I | A | Q | A | L | R | $r8 | hL | G | D | A | F | N | $ | F4F | F4F | A | | | —NH₂ | 1168.64 | 1169.59 | 0.7 | 127.0 | 121.0 | |
| 1779 | Ac- | | A | W | I | A | A | A | L | R | $r8 | hL | G | D | A | F | N | $ | Y | F4F | A | | | —NH₂ | 1118.11 | 1118.89 | 0.6 | 52.0 | 37.0 | |
| 1780 | Ac- | | A | W | I | A | A | A | L | R | $r8 | hL | G | D | A | F | N | $ | A | F4F | A | | | —NH₂ | 1072.1 | 1072.92 | 0.9 | 23.0 | 9.0 | |
| 1781 | Ac- | | I | W | I | A | Q | A | A | R | $r8 | hL | G | D | A | F | N | $ | F4F | F4F | A | | | —NH₂ | 1147.62 | 1148.59 | 0.5 | >1000 | >1000 | |
| 1782 | Ac- | | I | $r8 | I | A | Q | A | L | R | St | I | G | D | E | F | N | $s8 | Y | Y | A | | | —NH₂ | 1199.18 | 1199.74 | >40 | 1.1 | 1.1 | 22.0 |
| 1783 | Ac- | | I | W | I | A | $ | A | L | R | St | I | G | D | E | F | N | $s8 | Y | Y | A | | | —NH₂ | 1207.17 | 1207.7 | >40 | 1.6 | 1.6 | 19.2 |
| 1784 | Ac- | | I | W | I | A | Q | A | L | R | $r8 | I | G | D | E | F | N | St | Y | Y | A | $r5 | A | —NH₂ | 1306.72 | 1307.42 | >40 | 11.6 | 24.2 | 57.7 |

*Raji Cell Viability, 48 h, 5% serum

### Example 3: Dose-Dependent Cell Killing by Peptidomimetic Macrocycles

[0572] Aileron peptide A is formulated as a pharmaceutical formulation. Aileron peptide A is an alpha helical hydrocarbon cross-linked polypeptide macrocycle, with an amino acid sequence less than 25 amino acids long that is derived from BCL-2-like protein 11 (BIM). Aileron peptide A has a single cross link spanning amino acids in the i to the i+4 position of the amino acid sequence and has 8 amino acids between the i+4 position and the carboxyl terminus. Aileron peptide A binds to MCL-1 or a BCL-2 family protein to trigger apoptosis, and has a molecular weight in the range of 2500-2550 m/e.

[0573] Aileron peptide B is formulated as a pharmaceutical formulation. Aileron peptide B is an alpha helical hydrocarbon cross-linked polypeptide macrocycle, with an amino acid sequence less than 20 amino acids long that is derived from BCL-2-like protein 11 (BIM). Aileron peptide B has a single cross link spanning amino acids in the i to the i+7 position of the amino acid sequence and has 8 amino acids between the i+7 position and the carboxyl terminus. Aileron peptide 1 binds to MCL-1 or a BCL-2 family protein to trigger apoptosis, and has a molecular weight in the range of 2250-2300 m/e.

[0574] Aileron peptide C is formulated as a pharmaceutical formulation. Aileron peptide C is an alpha helical hydrocarbon cross-linked polypeptide macrocycle, with an amino acid sequence less than 25 amino acids long that is derived from BCL-2-like protein 11 (BIM). Aileron peptide C has a single cross link spanning amino acids in the i to the i+7 position of the amino acid sequence and has 3 amino acids between the i+7 position and the carboxyl terminus. Aileron peptide C binds to MCL-1 or a BCL-2 family protein to trigger apoptosis, and has a molecular weight in the range of 2500-2600 m/e.

[0575] BIM peptidomimetic macrocycles were tested for cell killing at various concentrations. Human Raji cells were treated with increasing doses of peptidomimetic macrocycles corresponding to Aileron peptide A (FIGS. 1 and 2), Aileron peptide B (FIGS. 1-3), and Aileron peptide C (FIGS. 3 and 4). An % Viable cells was calculated for each dose of the peptidomimetic macrocycle from a non-linear fit of response vs dose (GraphPad Prism). The effect of the peptidomimetic macrocycles corresponding to Aileron peptide A are presented in FIGS. 1 and 2. The effect of the peptidomimetic macrocycles corresponding to Aileron peptide B are presented in FIGS. 1-3. The effect of the peptidomimetic macrocycles corresponding to Aileron peptide C are presented in FIGS. 3 and 4.

### Example 4: MCL-1 Displacement Study

[0576] BIM peptidomimetic macrocycles were tested for displacement of MCL-1 from a BAK fluorescence resonance energy transfer (FRET) peptide. Human Raji cells were treated with DMSO, ABT-263, and peptidomimetic macrocycles corresponding to Aileron peptide A and Aileron peptide B. FIG. 5 shows the effect of the compounds on normalized BAK peptide FRET signal.

### Example 5: Pharmacokinetic (PK) and Bio-Distribution Study in Mice

[0577] A peptidomimetic macrocycle corresponding to Aileron peptide A was administered to mice at a 5 mg/kg dose. Mice were sacrificed at specific time points both before and after dosing, up to 24 hours post-administration. Blood, liver, and spleen were collected from the mice at the specific time points. Plasma was prepared from the blood using K2EDTA tubes by centrifuging for 20 minutes at 4° C. at 2000G maximum 30 minutes after collection. From each plasma sample, an aliquot was transferred to a fresh tube for PK studies. From each liver and spleen sample, tissue was homogenized and extracts were prepared for bio-distribution studies. FIG. 6 shows the PK and bio-distribution results for this study by concentration in nanograms of peptidomimetic macrocycle per gram mouse body weight (ng/g) over time.

### Example 6: Human Plasma Stability Study

[0578] Peptidomimetic macrocycles corresponding to Aileron peptide A or Aileron peptide B were administered to humans. Blood was collected at specific time points both before and after dosing, up to 24 hours post-administration. Plasma was prepared from the blood using K2EDTA tubes by centrifuging for 20 minutes at 4° C. at 2000G maximum 30 minutes after collection. From each plasma sample, an aliquot was transferred to a fresh tube for plasma stability studies. FIG. 7 shows the plasma stability results for this study as a percentage of peptidomimetic macrocycle remaining in plasma over time, with the dashed line corresponding to the initial amount of peptidomimetic macrocycle dosed.

### Example 7: Cell Viability and Caspase-3/7 Assay

[0579] Cancer cells were cultured using a standard culture medium containing 10% fetal bovine serum (FBS) and penicillin-streptomycin (A375P: DMEM; SK-MEL-2, SK-MEL-28: EMEM). Cells were plated in 96-well plates (5×103 cells per well) and, after overnight incubation, treated with the indicated concentrations of Stapled Peptides in the corresponding medium supplemented with 5% FBS for the indicated durations. Cell viability and caspase-3/7 activation was measured using CellTiter-Glo and Caspase-Glo 3/7 chemiluminescence reagents (Promega), respectively. Luminescence was detected by a microplate reader (Spectramax M5, Molecular Devices).

[0580] Aileron peptide 1 is formulated as a pharmaceutical formulation. Aileron peptide 1 is a warhead-containing alpha helical hydrocarbon cross-linked polypeptide macrocycle, with an amino acid sequence less than 25 amino acids long that is derived from BCL-2-like protein 11 (BIM). Aileron peptide 1 has a single cross link spanning amino acids in the i to the i+4 position of the amino acid sequence and has 8 amino acids between the i+4 position and the carboxyl terminus. Aileron peptide 1 binds to BFL-1 or a BCL-2 family protein to trigger apoptosis, and has a molecular weight in the range of 2500-2600 m/e.

[0581] Aileron peptide 2 is formulated as a pharmaceutical formulation. Aileron peptide 2 is an alpha helical hydrocarbon cross-linked polypeptide macrocycle, with an amino acid sequence less than 20 amino acids long that is derived from BCL-2-like protein 11 (BIM). Aileron peptide 2 has a single cross link spanning amino acids in the i to the i+7 position of the amino acid sequence and has 3 amino acids between the i+7 position and the carboxyl terminus. Aileron peptide 2 binds to BFL-1 or a BCL-2 family protein to trigger apoptosis, and has a molecular weight in the range of 2500-2600 m/e.

[0582] Aileron peptide 3 is formulated as a pharmaceutical formulation. Aileron peptide 3 is a warhead-containing alpha helical hydrocarbon cross-linked polypeptide macrocycle, with an amino acid sequence less than 20 amino acids long that is derived from BCL-2-like protein 11 (BIM). Aileron peptide 3 has a single cross link spanning amino acids in the i to the i+7 position of the amino acid sequence and has 3 amino acids between the i+7 position and the carboxyl terminus. Aileron peptide 3 binds to BFL-1 or a BCL-2 family protein to trigger apoptosis, and has a molecular weight in the range of 2400-2500 m/e.

[0583] FIG. 8 shows the results of treating A375P-cells with BIM SAHB_{A1} and Aileron peptide 1 (40 μM). The results show that neither BIM SAHB_{A1} nor Aileron peptide 1 affected proliferation and apoptosis induction in A375-P melanoma cells.

[0584] FIG. 9 shows the results of treating SK-MEL-2 cells with BIM SAHB_{A1} and Aileron peptide 1 (40 μM). The results show that neither BIM SAHB_{A1} nor Aileron peptide 1 affected proliferation and apoptosis induction in SK-MEL-2 melanoma cells.

[0585] FIG. 10 shows the results of treating SK-MEL-28 cells with BIM SAHB_{A1} and Aileron peptide 1 (40 μM). The results show that neither BIM SAHB_{A1} nor Aileron peptide 1 affected proliferation and apoptosis induction in SK-MEL-28 melanoma cells.

[0586] FIG. 11 shows the results of treating A375-P cells with Aileron peptide 2 or Aileron peptide 3 (40 μM). The results show that Aileron peptide 2 and Aileron peptide 3 inhibited proliferation and induced apoptosis in A375-P cells.

[0587] FIG. 12 shows the results of treating SK-MEL-2 cells with Aileron peptide 2 or Aileron peptide 3 (40 μM). The results show that Aileron peptide 2 and Aileron peptide 3 inhibited proliferation and induced apoptosis in SK-MEL-2 cells.

[0588] FIG. 13 shows the results of treating SK-MEL-28 cells with Aileron peptide 2 or Aileron peptide 3 (40 μM). The results show that Aileron peptide 2 and Aileron peptide 3 inhibited proliferation and induced apoptosis in SK-MEL-28 cells.

### Example 8: Mechanism of Action of Stapled BIM Peptides

[0589] The stapled BIM peptides of the disclosure can inhibit anti-apoptotic proteins, including BCL-2, MCL-1, and BCL-X_{L}. The stapled BIM peptides of the disclosure can also directly active BAX/BAK, which are two nuclear-encoded proteins present in higher eukaryotes that are able to pierce the mitochondrial outer membrane to mediate cell death by apoptosis. Organelles recruited by nucleated cells to supply energy that can be recruited by BAX and BAK to kill cells. The two proteins lie in wait in healthy cells, where they adopt a globular α-helical structure as monomers.

[0590] Following a variety of stress signals, BAX and BAK convert into pore-forming proteins by changing conformations and assembling into oligomeric complexes in the mitochondrial outer membrane. Proteins from the mitochondrial intermembrane space and empty into the cytosol to activate proteases that dismantle the cell. FIG. 14 illustrates how a stapled peptide derived from the protein BIM broadly targets BCL-2 family proteins, neutralizes BIM's prosurvival relatives (e.g., BCL-2, MCL-1, and BCLX_{L}), and directly activates BAX. FIG. 15 illustrates how a BH3-only protein (BIM) can directly activate mitochondrial BAK and cytosolic BAX, and inhibit the capacity of anti-apoptotic proteins to sequester activated forms of BAK and BAX, leading the inactive monomers of BAK and BAX to transform to toxic pore-forming proteins.

### Example 9: Crystal Structure of Stapled BIM Peptide Bound to MCL-1

[0591] FIG. 16 compares high resolution X-ray structures of: a stapled BIM peptide bound to MCL-1; Noxa BH3 bound to MCL-1 (Peptide: PDB: 2NLA); and BIM BH3 bound to MCL-1 (Peptide: PDB: 2NL9). FIG. 17 shows a 2 angstrom X-ray structure of a stapled BIM-BH3 peptide bound to MCL-1. The X-ray crystal structure showed that the crosslinker of the peptide was a cis-olefin.

### Example 10: Evaluation of the Biological Activity of Stapled BIM Peptides

[0592] The sequence information for the cross-linked peptides used in the studies are shown in TABLE 5. Aib represents 2-aminoisobutyric acid. $ represents an alpha-Me S5-pentenyl-alanine olefin amino acid connected to another amino acid side chain by an all-carbon crosslinker comprising one double bond, and $r8 represents an alpha-Me R8-octenyl-alanine olefin amino acid connected to another amino acid side chain by an all-carbon crosslinker comprising one double bond.

TABLE 5

| | SEQUENCE | | | | | | | | | | | | | | | | | | | | | | | SEQ ID |
|---|---|---|---|---|---|---|---|---|---|---|---|---|---|---|---|---|---|---|---|---|---|---|---|---|
| # | | 146 | 147 | 148 | 149 | 150 | 151 | 152 | 153 | 154 | 155 | 156 | 157 | 158 | 159 | 160 | 161 | 162 | 163 | 164 | | | | NO: |
| 1 | Ac | I | W | I | A | Q | A | L | R | $r8 | I | G | D | E | F | N | $ | Y | Y | A | | | NH2 | 1333 |
| 2 | Ac | I | W | I | A | Q | A | L | R | $r8 | I | G | D | Q | F | N | $ | Y | Y | A | | | NH2 | 1334 |
| 3 | Ac | I | W | I | A | A | A | L | R | $r8 | I | G | D | E | F | N | $ | Y | Y | A | | | NH2 | 1335 |
| 4 | Ac | I | W | I | A | A | A | L | R | $r8 | I | G | D | Q | F | N | $ | Y | Y | A | | | NH2 | 1336 |
| 5 | Ac | I | W | I | A | Q | A | L | Cit | $r8 | I | G | D | A | F | N | $ | Y | Y | A | | | NH2 | 1341 |
| 6 | Ac | I | W | I | A | Q | A | L | Cit | $r8 | I | G | D | Q | F | N | $ | Y | Y | A | | | NH2 | 1342 |
| 7 | Ac | I | W | I | A | Q | A | L | R | $r8 | I | G | D | A | A | N | $ | Y | Y | A | | | NH2 | 1347 |
| 8 | Ac | I | W | I | A | Q | A | L | R | $r8 | I | G | D | Q | A | N | $ | Y | Y | A | | | NH2 | 1348 |
| 9 | Ac | I | W | I | A | Q | A | L | R | $r8 | I | A | D | Q | F | N | $ | Y | Y | A | | | NH2 | 1353 |
| 10 | Ac | I | W | I | A | Q | A | L | R | $r8 | A | G | D | Q | F | N | $ | Y | Y | A | | | NH2 | 1355 |
| 11 | Ac | I | W | I | A | Q | A | L | A | $r8 | I | G | D | A | F | N | $ | Y | Y | A | | | NH2 | 1361 |
| 12 | Ac | I | W | I | A | Q | A | L | R | $r8 | I | G | N | A | F | N | $ | Y | Y | A | | | NH2 | 1362 |
| 13 | Ac | I | W | I | A | Q | A | A | R | $r8 | I | G | D | A | F | N | $ | Y | Y | A | | | NH2 | 1363 |
| 14 | Ac | R | W | I | A | Q | A | L | R | $ | I | G | D | $ | L | N | Aib | F | Y | A | H | H | NH2 | 763 |
| 15 | Ac | I | W | I | A | Q | A | L | R | $r8 | I | G | D | E | F | N | $ | Y | Y | A | R | R | NH2 | 545 |
| 16 | Ac | I | W | I | A | Q | A | L | R | $r8 | hL | g | D | A | F | N | $ | Y | F4F | A | | | NH2 | 1621 |

[0593] The binding spectrum of stapled BIM BH3 peptides were tuned for BCL-2 family selectivity. TABLE 6 shows the Ki values (nM) of MCL-1, BCL-x_{L}, and BCL-2 for ABT-199, and peptide #1-peptide #13. ABT-199 is venetoclax, and † represents values reported in the literature.

TABLE 6

| Cross-linked | Mcl-1 | Bcl-x_{L} | Bcl-2 | |
|---|---|---|---|---|
| Peptide # | Kᵢ (nM) | Kᵢ (nM) | Kᵢ (nM) | Profile |
| ABT-199^{†} | >444 | 48 | <0.01 | Bcl-2 selective |
| 1 | 1.8 | 1.4 | 3.2 | Pan-selective |
| 2 | 5.2 | 12 | 67 | Pan-selective |
| 3 | 1 | 1 | 6 | Pan-selective |
| 4 | 6 | 4 | 22 | Pan-selective |
| 5 | 7.5 | 109.9 | 211.6 | Mcl-1 selective |
| 6 | 1.7 | 28.8 | 88.2 | Mcl-1 selective |
| 7 | 7.5 | 401.7 | 139.7 | Mcl-1 selective |
| 8 | 1.4 | 24.9 | 43.9 | Mcl-1 selective |
| 9 | 116.2 | 7.7 | 25.6 | Bcl-xL/Bcl-2 selective |
| 10 | 122.1 | 1.9 | 4.8 | Bcl-xL/Bcl-2 selective |
| 11 | 73.8 | 386.4 | 1094.8 | negative control |
| 12 | 194.7 | 416.0 | 404.9 | negative control |
| 13 | 500.7 | 100000 | 100000 | negative control |

[0594] The stapled BIM peptides were shown to disrupt the formation of MCL-1/BAK complexes in living cells. FIG. 18 illustrates how stapled BIM peptides of the disclosure can disrupt the formation of MCL-1/BAK complexes in living cells. An assay was performed to determine the inhibitory constant (Kᵢ) of BCL-x_{L}, BCL-2, and MCL-1 in the presence of cross-linked peptide #14. The data show that in the presence of cross-linked peptide #14, the Kᵢ of MCL-1 was drastically lower than the Kᵢ of BCL-x_{L} or BCL-2. TABLE 7 shows the results of the assay.

TABLE 7

| Assay | Peptide #14 |
|---|---|
| BCL-x_{L} Kᵢ (nM) | 178 |
| BCL-2 Kᵢ (nM) | 151 |
| MCL-1 Kᵢ (nM) | 11 |

[0595] FIG. 19 compares normalized FRET signals of samples to determine the samples' effects in disrupting MCL-1/BAK protein-protein interactions. Cross-linked peptide #14 was highly effective in disrupting the MCL-1/BAK protein-protein interaction at concentrations of 10 μM and 20 μM. Cross-linked peptide #14 was equally effective at disrupting the interaction of MCL-1/BAK at 10 μM and 20 μM. ABT-263 (navitoclax) did not disrupt the protein-protein interaction of MCL-1/BAK. ABT-263 did not disrupt the protein-protein interaction of MCL-1/BAK at concentrations of 5 μM or 10 μM.

[0596] Peptides #14, #15, and #16 were tested against BH3 mimetic ABT-737, ABT-263 (navitoclax), and ABT-199 (venetoclax). TABLE 8 shows that crosslinked-peptide #16 was the most effective BIM stapled peptide. † represents valued reported in the literature.

[chemical structure]

[chemical structure]

TABLE 8

| | | Mcl-1 | Bcl-x_{L} | Bcl-2 |
|---|---|---|---|---|
| Compound | Profile | Kᵢ (nM) | Kᵢ (nM) | Kᵢ (nM) |
| BIM-SAHB_{A1} | Pan-selective | 2.7 | 6.2 | 29.6 |
| Peptide #14 | Mcl-1 selective | 17 | 114.5 | 214.7 |
| Peptide #15 | Pan-selective | 10.6 | 5.2 | 12.8 |
| Peptide #16 | Pan-selective | 27 | 13 | ND |
| ABT-737 | Bcl-xL/Bcl-2 selective | >1000 | 1.7 | 3.1 |
| ABT-263 | Bcl-xL/Bcl-2 selective | >1000 | 0.4 | 0.9 |
| ABT-263^{†} | Bcl-xL/Bcl-2 selective | >224 | 0.055 | 0.044 |
| ABT-199^{†} | Bcl-2 selective | >444 | 48 | <0.01 |

### Lactate Dehydrogenase Cytotoxicity Colorimetric Assay

[0597] When cell membranes are compromised or damaged, lactate dehydrogenase (LDH), a soluble yet stable enzyme found inside every living cell, is released into the surrounding extracellular space. The presence of LDH in the culture medium can be used as a cell death marker. The relative amounts of live and dead cells within the medium can then be quantified by measuring the amount of released LDH using a colorimetric or fluorimetric LDH cytotoxicity assay. When using an LDH colorimetric assay, the amount of LDH released in the surrounding environment is measured with an enzymatic reaction that converts iodonitrotetrazolium (INT) into red-colored formazan. When LDH is present in the cell culture, the LDH reduces NAD⁺ to NADH and H⁺ through the oxidation of lactate to pyruvate. Afterward, the catalyst (diaphorase) then transfers H/H⁺ from NADH⁺H⁺ to the trazolium salt INT to form the red-colored formazan salt. The amount of color produced is measured at 490 nm by standard spectroscopy, and is proportional to the amount of damaged cells in the culture.

[0598] Cross-linked peptide #16 exhibited on-mechanism cytotoxic activity in BAX-BAK″^{wt} MEF cells, but not BAX-BAK^{-/-} double-knock outs. No off-target cytotoxicity was observed for peptide #16 in the LDH assay (all with 5% serum). FIG. 20 shows that cross-linked peptide #16 exhibited on-mechanism cytotoxic activity against BAX-BAK^{wt/wt} (●) MEF cells but did not exhibit on-mechanism cytotoxic activity in BAX-BAK^{-/-} double knock outs (DKO) (▴).

### Apoptotic Response Against BFL-1-Drive Melanoma Cell Lines

[0599] Cross-linked peptide #16 was tested to determine the compound's ability to yield an enhanced apoptotic response against BFL-1-drive melanoma cell lines. Relative caspase-3/7 activation and % cell viability were measured using A375-P, SK-MEL-2, and SK-MEL-28 cell lines. BIM SAHB_{A1} (40 μM, 5% serum) was used as a control. Consistent with greater cell potency, treatment of the cell lines with Peptide #16 induced higher levels of caspase-3/7 activation compared to the control. FIG. 21 shows that treatment of A375-P (1), SK-MEL-2 (2), and SK-MEL-28 (3) with peptide #16 induced higher levels of caspase-3/7 activation than the BIM SAHB_{A1} control. FIG. 22 shows that treatment of A375-P (1), SK-MEL-2 (2), and SK-MEL-28 (3) with peptide #16 decreased the % viability of the cells, while treatment with BIM SAHB_{A1} had no effect on % viability.

### Anti-Proliferative Activity in ABT-199 Resistant Burkitt Lymphoma Raji Cell Line

[0600] WST-1 is a cell proliferation reagent that is used in colorimetric assays designed to measure the relative proliferation rates of cells in culture. The assay is based on the conversion of the tetrazolium salt WST-1 into a colored dye by mitochondrial dehydrogenase enzymes. The soluble salt is released into the media. Within a given time period, the reaction produces a color change that is directly proportional to the amount of mitochondrial dehydrogenase in a culture. The WST-1 assay measures the net metabolic activity of cells.

[0601] Raji cell proliferation was measured by treating ABT-199 resistant Burkitt lymphoma Raji cells with BIM SAHB_{A1}, ABT-199, and Peptide #16. FIG. 23 shows that peptide #16 was ten times more potent than BIM SAHB_{A1} in the MCL-1-1 driven Raji cell line. TABLE 9 shows the IC50 values calculated using the data presented in FIG. 22.

TABLE 9

| | BIM SAHB_{A1} | ABT-199 | Peptide #16 |
|---|---|---|---|
| IC₅₀ | 23.67 | 3.104 | 2.000 |

### Anti-Proliferative Effects

[0602] Combination Treatment with Peptide #16 with ABT-199

[0603] Fixed doses of cross-linked peptide #16 were combined with varying levels of ABT-199 (venetoclax) to evaluate the anti-proliferative effects of combination treatment. Raji cell proliferation was determined by treating cells with ABT-199 (●); ABT-199+0.95 μM peptide #16 (▪); ABT-199+1.9 μM peptide #16 (▴); and ABT-199+3.8 μM peptide #16 (▾). The anti-proliferative effects of BCL-2-selective ABT-199 (EC₅₀ 3.7-4.9 μM) were enhanced by BIM-stapled peptide #16, a potent MCL-1 inhibitor, in MCL-1 driven Raji cells. FIG. 24 shows that Raji cell proliferation (fraction of control) decreased with increasing doses of peptide #16 in a dose-dependent manner.

[0604] Raji cell proliferation was also determined by treating cells with peptide #16 (●); peptide #16+1.9 μM ABT-199 (▪); peptide #16+3.8 μM ABT-199 (▴); and peptide #16+3.8 μM ABT-199 (▾). The anti-proliferative effects of BCL-2-selective peptide #16 (EC₅₀ 1.2-1.6 μM) were enhanced by ABT-199 in MCL-1 driven Raji cells. FIG. 25 shows that Raji cell proliferation (fraction of control) decreased with increasing doses of ABT-199 in a dose-dependent manner.

[0605] The ABT-199/Peptide #16 combination studies revealed additive to synergistic complementarity effects. FIG. 26 shows that the combination index (CI) of the combination study had additive to synergistic complementary effects.

### EMBODIMENTS

[0606] The following non-limiting embodiments provide illustrative examples of the invention, but do not limit the scope of the invention.

### Embodiment 1

[0607] A peptidomimetic macrocycle of Formula (Ic):

[chemical structure]

wherein:

[0608] each A, C, D, E, and F is independently a natural or non-natural amino acid;

[0609] each B is independently a natural or non-natural amino acid, amino acid analogue,

[chemical structure]

[—NH-L₃-CO—], [—NH-L₃-SO₂—], or [—NH-L₃-];

[0610] WH is an amino acid with an electron accepting group susceptible to attack by a nucleophile;

[0611] each L is independently a macrocycle-forming linker;

[0612] each L′ is independently alkylene, alkenylene, alkynylene, heteroalkylene, cycloalkylene, heterocycloalkylene, arylene, or heteroarylene, each being optionally substituted with R₅, or a bond, or together with R₁ and the atom to which both R₁ and L′ are bound forms a ring;

[0613] each L″ is independently alkylene, alkenylene, alkynylene, heteroalkylene, cycloalkylene, heterocycloalkylene, arylene, or heteroarylene, each being optionally substituted with R₅, or a bond, or together with R₂ and the atom to which both R₂ and L″ are bound forms a ring;

[0614] each R₁ is independently-H, alkyl, alkenyl, alkynyl, arylalkyl, cycloalkyl, cycloalkylalkyl, heteroalkyl, or heterocycloalkyl, each being optionally substituted with halo-, or together with L′ and the atom to which both R₁ and L′ are bound forms a ring;

[0615] each R₂ is independently-H, alkyl, alkenyl, alkynyl, arylalkyl, cycloalkyl, cycloalkylalkyl, heteroalkyl, or heterocycloalkyl, each being optionally substituted with halo-, or together with L″ and the atom to which both R₂ and L″ are bound forms a ring;

[0616] each R₃ is independently —H, alkyl, alkenyl, alkynyl, arylalkyl, heteroalkyl, cycloalkyl, heterocycloalkyl, cycloalkylalkyl, aryl, or heteroaryl, each being optionally substituted with R₅;

[0617] each L₃ is independently alkylene, alkenylene, alkynylene, heteroalkylene, cycloalkylene, heterocycloalkylene, arylene, heteroarylene, or [—R₄—K—R₄-]ₙ, each being optionally substituted with R₅;

[0618] each R₄ is independently alkylene, alkenylene, alkynylene, heteroalkylene, cycloalkylene, heterocycloalkylene, arylene, or heteroarylene;

[0619] each K is independently O, S, SO, SO₂, CO, CO₂, or CONR₃;

[0620] each n is independently 1, 2, 3, 4, or 5;

[0621] each R₅ is independently halogen, alkyl, —OR₆, —N(R₆)₂, —SR₆, —SOR₆, —SO₂R₆, —CO₂R₆, a fluorescent moiety, a radioisotope, or a therapeutic agent;

[0622] each R₆ is independently —H, alkyl, alkenyl, alkynyl, arylalkyl, cycloalkylalkyl, heterocycloalkyl, a fluorescent moiety, a radioisotope, or a therapeutic agent;

[0623] each R₇ is independently —H, alkyl, alkenyl, alkynyl, arylalkyl, cycloalkyl, heteroalkyl, cycloalkylalkyl, heterocycloalkyl, aryl, or heteroaryl, each being optionally substituted with R₅, or part of a cyclic structure with a D residue;

[0624] each R₈ is independently —H, alkyl, alkenyl, alkynyl, arylalkyl, cycloalkyl, heteroalkyl, cycloalkylalkyl, heterocycloalkyl, aryl, or heteroaryl, each being optionally substituted with R₅, or part of a cyclic structure with an E residue;

[0625] each v and w is independently an integer from 1-1000;

[0626] t is 0;

[0627] u is 1, 2, 3, 4, 5, 6, 7, 8, 9, or 10; and

[0628] each x, y and z is independently 0, 1, 2, 3, 4, 5, 6, 7, 8, 9, or 10, or

a pharmaceutically-acceptable salt thereof.

### Embodiment 2

[0629] The peptidomimetic macrocycle of embodiment 1, wherein the peptidomimetic macrocycle comprises two crosslinks, wherein a first crosslink is of a first pair of amino acid residues, and a second crosslink is of a second pair of amino acid residues.

### Embodiment 3

[0630] The peptidomimetic macrocycle of embodiment 1 or 2, wherein the first pair of amino acid residues and the second pair of amino acid residues do not share a common amino acid residue.

### Embodiment 4

[0631] The peptidomimetic macrocycle of embodiments 1 or 2, wherein the first pair of amino acid residues and the second pair of amino acid residues share one common amino acid residue.

### Embodiment 5

[0632] The peptidomimetic macrocycle of any one of embodiments 1-4, wherein w is at least 2 and at least two E amino acids are His residues.

### Embodiment 6

[0633] The peptidomimetic macrocycle of any one of embodiments 1-5, wherein the peptidomimetic macrocycle comprises a helix.

### Embodiment 7

[0634] The peptidomimetic macrocycle of any one of embodiments 1-6, wherein the peptidomimetic macrocycle comprises an α-helix.

### Embodiment 8

[0635] The peptidomimetic macrocycle of any one of embodiments 1-7, wherein each of v and w is independently 1, 2, 3, 4, 5, 6, 7, 8, 9, 10, 11, 12, 13, 14, or 15.

### Embodiment 9

[0636] The peptidomimetic macrocycle of any one of embodiments 1-8, wherein each of v and w is independently 3, 4, 5, 6, 7, 8, 9, or 10.

### Embodiment 10

[0637] The peptidomimetic macrocycle of any one of embodiments 1-9, wherein v is 8.

### Embodiment 11

[0638] The peptidomimetic macrocycle of any one of embodiments 1-10, wherein w is 6.

### Embodiment 12

[0639] The peptidomimetic macrocycle of any one of embodiments 1-11, wherein L is

[chemical structure]

### Embodiment 13

[0640] The peptidomimetic macrocycle of any one of embodiments 1-12, wherein R¹ and R² are H.

### Embodiment 14

[0641] The peptidomimetic macrocycle of any one of embodiments 1-12, wherein R¹ and R² are independently alkyl.

### Embodiment 15

[0642] The peptidomimetic macrocycle of any one of embodiments 1-12 and 14, wherein R¹ and R² are methyl.

### Embodiment 16

[0643] The peptidomimetic macrocycle of any one of embodiments 1-15, wherein the peptidomimetic macrocycle exhibits a selectivity ratio of one target over another that is from about 2:1 to about 1000:1.

### Embodiment 17

[0644] The peptidomimetic macrocycle of any one of embodiments 1-16, wherein the peptidomimetic macrocycle exhibits a selectivity ratio of one target over another that is from about 5:1 to about 1000:1.

### Embodiment 18

[0645] The peptidomimetic macrocycle of any one of embodiments 1-17, wherein the peptidomimetic macrocycle exhibits a selectivity ratio of one target over another that is from about 10:1 to about 1000:1.

### Embodiment 19

[0646] The peptidomimetic macrocycle of any one of embodiments 1-18, wherein the peptidomimetic macrocycle exhibits a selectivity ratio of one target over another that is from about 100:1 to about 1000:1.

### Embodiment 20

[0647] The peptidomimetic macrocycle of any one of embodiments 1-19, wherein the peptidomimetic macrocycle comprises an amino acid sequence that has at least 60% identity to any one of SEQ ID NOs.: 1-1625.

### Embodiment 21

[0648] The peptidomimetic macrocycle of any one of embodiments 1-20, wherein the peptidomimetic macrocycle comprises an amino acid sequence that has at least 60% identity to any one of SEQ ID NOs.: 2-400.

### Embodiment 22

[0649] The peptidomimetic macrocycle of any one of embodiments 1-20, wherein the peptidomimetic macrocycle comprises an amino acid sequence that has at least 60% identity to any one of SEQ ID NOs.: 707-757.

### Embodiment 23

[0650] The peptidomimetic macrocycle of any one of embodiments 1-20, wherein the peptidomimetic macrocycle comprises an amino acid sequence that has at least 60% identity to any one of SEQ ID NOs.: 912-922.

### Embodiment 24

[0651] The peptidomimetic macrocycle of any one of embodiments 1-20, wherein the peptidomimetic macrocycle comprises an amino acid sequence that has at least 60% identity to any one of SEQ ID NOs.: 1600-1625.

### Embodiment 25

[0652] The peptidomimetic macrocycle of any one of embodiments 1-23, wherein the peptidomimetic macrocycle comprises an amino acid sequence that has at least 60% identity to any one of SEQ ID NOs.: 12, 755, and 920.

### Embodiment 26

[0653] The peptidomimetic macrocycles of any one of embodiments 1-25, wherein WH is an amino acid with a side chain of the formula:

[chemical structure]

wherein:
[0654] X is alkylene, CH, CH₂, NR^{α}, O, or S, wherein R^{α} is —H, alkyl, alkenyl, alkynyl, arylalkyl, cycloalkyl, heteroalkyl, cycloalkylalkyl, heterocycloalkyl, cycloaryl, or heterocycloaryl;
[0655] R^{a} is H, CN, or C(O)CH₃;
[0656] R^{b} is H, methyl, ethyl, allyl, propyl, isopropyl, butyl, or isobutyl;
[0657] each R^{c}, R^{d}, and R^{e} is independently —H, C₁-C₄ saturated or unsaturated, straight or branched, hydrocarbon chain, or an electron-withdrawing group, wherein at least one of R^{c}, R^{d}, and R^{e} is an electron withdrawing group;
[0658] R^{f} is halogen, a C₂ alkynyl or alkenyl side chain optionally substituted with oxo, halogen, NO₂, or CN; and
[0659] n′ iso, 1, 2, 3, 4, or 5.

### Embodiment 27

[0660] The peptidomimetic macrocycles of any one of embodiments 1-25, wherein WH is an amino acid with a side chain of the formula:

[chemical structure]

[0661] wherein:
[0662] X is alkylene, CH, CH₂, NR^{α}, O, or S, wherein R^{α} is —H, alkyl, alkenyl, alkynyl, arylalkyl, cycloalkyl, heteroalkyl, cycloalkylalkyl, heterocycloalkyl, cycloaryl, or heterocycloaryl; and
[0663] each R^{c}, R^{d}, and R^{e} is independently —H, C₁-C₄ saturated or unsaturated, straight or branched, hydrocarbon chain, or an electron-withdrawing group, wherein at least one of R^{c}, R^{d}, and R^{e} is an electron withdrawing group.

### Embodiment 28

[0664] The peptidomimetic macrocycle of any one of embodiments 1-25, wherein WH is an amino acid with a side chain of the formula:

[chemical structure]

### Embodiment 29

[0665] The peptidomimetic macrocycles of any one of embodiments 1-26, wherein WH is an amino acid with a side chain of the formula:

[chemical structure]

### Embodiment 30

[0666] The peptidomimetic macrocycles of any one of embodiments 1-26, wherein WH is an amino acid with a side chain of the formula:

[chemical structure]

wherein:
[0667] X is alkylene, CH, CH₂, NR^{α}, O, or S, wherein R^{α} is —H, alkyl, alkenyl, alkynyl, arylalkyl, cycloalkyl, heteroalkyl, cycloalkylalkyl, heterocycloalkyl, cycloaryl, or heterocycloaryl;
[0668] each R^{c}, R^{d}, and R^{e} is independently —H, C₁-C₄ saturated or unsaturated, straight or branched, hydrocarbon chain, or an electron-withdrawing group, wherein at least one of R^{c}, R^{d}, and R^{e} is an electron withdrawing group; and
[0669] n′ is 0, 1, 2, 3, 4, or 5.

### Embodiment 31

[0670] The peptidomimetic macrocycle of any one of embodiments 1-26, wherein WH is an amino acid with a side chain of the formula:

[chemical structure]

wherein each R^{c}, R^{d}, and R^{e} is independently —H, C₁-C₄ saturated or unsaturated, straight or branched, hydrocarbon chain, or an electron-withdrawing group, wherein at least one of R^{c}, R^{d}, and R^{e} is an electron withdrawing group; and n′ is 0, 1, 2, 3, 4, or 5.

### Embodiment 32

[0671] A pharmaceutical composition comprising a peptidomimetic macrocycle of any one of embodiments 1-31 and a pharmaceutically-acceptable carrier.

### Embodiment 33

[0672] A method of treating a disorder, the method comprising administering to a subject in need thereof a therapeutically-effective amount of the peptidomimetic macrocycle of any one of embodiments 1-31.

### Embodiment 34

[0673] The method of embodiment 33, wherein the disorder is a cancer.

### Embodiment 35

[0674] The method of embodiments 33 or 34, wherein the cancer is a solid cancer.

### Embodiment 36

[0675] The method of embodiments 33 or 34, wherein the cancer is a liquid cancer.

### Embodiment 37

[0676] The method of any one of embodiments 33-36, wherein the cancer is resistant to a BCL-2 inhibitor therapy.

### Embodiment 38

[0677] The method of any one of embodiments 33-37, wherein the BCL-2 inhibitor therapy is navitoclax or obatoclax.

### Embodiment 39

[0678] The method of any one of embodiments 33-35, 37, or 38, wherein the cancer is a lymphoma.

### Embodiment 40

[0679] The method of any one of embodiments 33-35 or 37-39, wherein the cancer is B-cell lymphoma.

### Embodiment 41

[0680] The method of any one of embodiments 33-40, wherein the administration is intravenous.

### Embodiment 42

[0681] The method of any one of embodiments 33-40, wherein the administration is subcutaneous.

### Embodiment 43

[0682] The method of any one of embodiments 33-40, wherein the administration is oral.

### Embodiment 44

[0683] The method of any one of embodiments 33-43, further comprising administering to the subject a therapeutically-effective amount of a BCL-2 inhibitor.

### Embodiment 45

[0684] The method of any one of embodiments 33-44, wherein the BCL-2 inhibitor is obatoclax.

### Embodiment 46

[0685] The method of any one of embodiments 33-44, wherein the BCL-2 inhibitor is venetoclax.

### Embodiment 47

[0686] The method of any one of embodiments 33-44, wherein the BCL-2 inhibitor is navitoclax.

1. A peptidomimetic macrocycle of Formula (Ic): [chemical structure]
wherein:
each A, C, D, E, and F is independently a natural or non-natural amino acid;
each B is independently a natural or non-natural amino acid, amino acid analogue, [chemical structure]
[—NH-L₃-CO—], [—NH-L₃-SO₂—], or [—NH-L₃-];
WH is an amino acid with an electron accepting group susceptible to attack by a nucleophile;
each L is independently a macrocycle-forming linker;
each L′ is independently alkylene, alkenylene, alkynylene, heteroalkylene, cycloalkylene, heterocycloalkylene, arylene, or heteroarylene, each being optionally substituted with R₅, or a bond, or together with R₁ and the atom to which both R₁ and L′ are bound forms a ring;
each L″ is independently alkylene, alkenylene, alkynylene, heteroalkylene, cycloalkylene, heterocycloalkylene, arylene, or heteroarylene, each being optionally substituted with R₅, or a bond, or together with R₂ and the atom to which both R₂ and L″ are bound forms a ring;
each R₁ is independently —H, alkyl, alkenyl, alkynyl, arylalkyl, cycloalkyl, cycloalkylalkyl, heteroalkyl, or heterocycloalkyl, each being optionally substituted with halo-, or together with L′ and the atom to which both R₁ and L′ are bound forms a ring;
each R₂ is independently —H, alkyl, alkenyl, alkynyl, arylalkyl, cycloalkyl, cycloalkylalkyl, heteroalkyl, or heterocycloalkyl, each being optionally substituted with halo-, or together with L″ and the atom to which both R₂ and L″ are bound forms a ring;
each R₃ is independently —H, alkyl, alkenyl, alkynyl, arylalkyl, heteroalkyl, cycloalkyl, heterocycloalkyl, cycloalkylalkyl, aryl, or heteroaryl, each being optionally substituted with R₅;
each L₃ is independently alkylene, alkenylene, alkynylene, heteroalkylene, cycloalkylene, heterocycloalkylene, arylene, heteroarylene, or [—R₄—K—R₄-]ₙ, each being optionally substituted with R₅;
each R₄ is independently alkylene, alkenylene, alkynylene, heteroalkylene, cycloalkylene, heterocycloalkylene, arylene, or heteroarylene;
each K is independently O, S, SO, SO₂, CO, CO₂, or CONR₃;
each n is independently 1, 2, 3, 4, or 5;
each R₅ is independently halogen, alkyl, —OR₆, —N(R₆)₂, —SR₆, —SOR₆, —SO₂R₆, —CO₂R₆, a fluorescent moiety, a radioisotope, or a therapeutic agent;
each R₆ is independently —H, alkyl, alkenyl, alkynyl, arylalkyl, cycloalkylalkyl, heterocycloalkyl, a fluorescent moiety, a radioisotope, or a therapeutic agent;
each R₇ is independently —H, alkyl, alkenyl, alkynyl, arylalkyl, cycloalkyl, heteroalkyl, cycloalkylalkyl, heterocycloalkyl, aryl, or heteroaryl, each being optionally substituted with R₅, or part of a cyclic structure with a D residue;
each R₈ is independently —H, alkyl, alkenyl, alkynyl, arylalkyl, cycloalkyl, heteroalkyl, cycloalkylalkyl, heterocycloalkyl, aryl, or heteroaryl, each being optionally substituted with R₅, or part of a cyclic structure with an E residue;
each v and w is independently an integer from 1-1000;
t is 0;
u is 1, 2, 3, 4, 5, 6, 7, 8, 9, or 10; and
each x, y and z is independently 0, 1, 2, 3, 4, 5, 6, 7, 8, 9, or 10, or
a pharmaceutically-acceptable salt thereof.

2. The peptidomimetic macrocycle of claim 1, wherein the peptidomimetic macrocycle comprises two crosslinks, wherein a first crosslink is of a first pair of amino acid residues, and a second crosslink is of a second pair of amino acid residues.

3-4. (canceled)

5. The peptidomimetic macrocycle of claim 1, wherein w is at least 2 and at least two E amino acids are His residues.

6. The peptidomimetic macrocycle of claim 1, wherein the peptidomimetic macrocycle comprises a helix.

7. The peptidomimetic macrocycle of claim 1, wherein the peptidomimetic macrocycle comprises an α-helix.

8-9. (canceled)

10. The peptidomimetic macrocycle of claim 1, wherein v is 8.

11. The peptidomimetic macrocycle of claim 1, wherein w is 6.

12. The peptidomimetic macrocycle of claim 1, wherein L is

[chemical structure]

13. (canceled)

14. The peptidomimetic macrocycle of claim 1, wherein R¹ and R² are independently alkyl.

15. The peptidomimetic macrocycle of claim 1, wherein R¹ and R² are methyl.

16. (canceled)

17. The peptidomimetic macrocycle of claim 1, wherein the peptidomimetic macrocycle exhibits a selectivity ratio of one target over another that is from about 5:1 to about 1000:1.

18. (canceled)

19. The peptidomimetic macrocycle of claim 1, wherein the peptidomimetic macrocycle exhibits a selectivity ratio of one target over another that is from about 100:1 to about 1000:1.

20. The peptidomimetic macrocycle of claim 1, wherein the peptidomimetic macrocycle comprises an amino acid sequence that has at least 60% identity to any one of SEQ ID NOs.: 1-1625.

21. The peptidomimetic macrocycle of claim 1, wherein the peptidomimetic macrocycle comprises an amino acid sequence that has at least 60% identity to any one of SEQ ID NOs.: 2-400.

22. The peptidomimetic macrocycle of claim 1, wherein the peptidomimetic macrocycle comprises an amino acid sequence that has at least 60% identity to any one of SEQ ID NOs.: 707-757.

23. The peptidomimetic macrocycle of claim 1, wherein the peptidomimetic macrocycle comprises an amino acid sequence that has at least 60% identity to any one of SEQ ID NOs.: 912-922.

24. The peptidomimetic macrocycle of claim 1, wherein the peptidomimetic macrocycle comprises an amino acid sequence that has at least 60% identity to any one of SEQ ID NOs.: 1600-1625.

25. The peptidomimetic macrocycle of claim 1, wherein the peptidomimetic macrocycle comprises an amino acid sequence that has at least 60% identity to any one of SEQ ID NOs.: 12, 755, and 920.

26. The peptidomimetic macrocycles of claim 1, wherein WH is an amino acid with a side chain of the formula: [chemical structure]
wherein:
X is alkylene, CH, CH₂, NR^{α}, O, or S, wherein R^{α} is —H, alkyl, alkenyl, alkynyl, arylalkyl, cycloalkyl, heteroalkyl, cycloalkylalkyl, heterocycloalkyl, cycloaryl, or heterocycloaryl;
R^{a} is H, CN, or C(O)CH₃;
R^{b} is H, methyl, ethyl, allyl, propyl, isopropyl, butyl, or isobutyl;
each R^{c}, R^{d}, and R^{e} is independently —H, C₁-C₄ saturated or unsaturated, straight or branched, hydrocarbon chain, or an electron-withdrawing group, wherein at least one of R^{c}, R^{d}, and R^{e} is an electron withdrawing group;
R^{f} is halogen, a C₂ alkynyl or alkenyl side chain optionally substituted with oxo, halogen, NO₂, or CN; and
n′ iso, 1, 2, 3, 4, or 5.

27. The peptidomimetic macrocycles of claim 1, wherein WH is an amino acid with a side chain of the formula: [chemical structure]
wherein:
X is alkylene, CH, CH₂, NR^{α}, O, or S, wherein R^{α} is —H, alkyl, alkenyl, alkynyl, arylalkyl, cycloalkyl, heteroalkyl, cycloalkylalkyl, heterocycloalkyl, cycloaryl, or heterocycloaryl; and
each R^{c}, R^{d}, and R^{e} is independently —H, C₁-C₄ saturated or unsaturated, straight or branched, hydrocarbon chain, or an electron-withdrawing group, wherein at least one of R^{c}, R^{d}, and R^{e} is an electron withdrawing group.

28. The peptidomimetic macrocycle of claim 27, wherein WH is an amino acid with a side chain of the formula:

[chemical structure]

29. The peptidomimetic macrocycles of claim 26, wherein WH is an amino acid with a side chain of the formula: [chemical structure]
wherein R^{b} is H, methyl, ethyl, allyl, propyl, isopropyl, butyl, or isobutyl.

30. The peptidomimetic macrocycles of claim 26, wherein WH is an amino acid with a side chain of the formula: [chemical structure]
wherein:
X is alkylene, CH, CH₂, NR^{α}, O, or S, wherein R^{α} is —H, alkyl, alkenyl, alkynyl, arylalkyl, cycloalkyl, heteroalkyl, cycloalkylalkyl, heterocycloalkyl, cycloaryl, or heterocycloaryl;
each R^{c}, R^{d}, and R^{e} is independently —H, C₁-C₄ saturated or unsaturated, straight or branched, hydrocarbon chain, or an electron-withdrawing group, wherein at least one of R^{c}, R^{d}, and R^{e} is an electron withdrawing group; and
n′ is 0, 1, 2, 3, 4, or 5.

31. The peptidomimetic macrocycle of claim 26, wherein WH is an amino acid with a side chain of the formula: [chemical structure]
wherein each R^{c}, R^{d}, and R^{e} is independently —H, C₁-C₄ saturated or unsaturated, straight or branched, hydrocarbon chain, or an electron-withdrawing group, wherein at least one of R^{c}, R^{d}, and R^{e} is an electron withdrawing group; and n′ is 0, 1, 2, 3, 4, or 5.

32-47. (canceled)

The application's sequence listing, which the Patent Office published only in electronic form, follows.

SEQUENCE LISTING (1785 sequences)

SEQ ID NO: 1 - protein, 21 aa, Artificial Sequence
  Description of Artificial Sequence: Synthetic peptide
  N-term Ac
  C-term NH2
IWIAQELRRIGDEFNAYYARR

SEQ ID NO: 2 - protein, 21 aa, Artificial Sequence
  Description of Artificial Sequence: Synthetic peptide
  N-term Ac
  MOD_RES (9)..(9): Alpha-Me S5-pentenyl-alanine olefin amino acid connected by an all-carbon crosslinker comprising one double bond
  MISC_FEATURE (9)..(13): Crosslink between residues
  MOD_RES (13)..(13): Alpha-Me S5-pentenyl-alanine olefin amino acid connected by an all-carbon crosslinker comprising one double bond
  C-term NH2
IWIAQELRAIGDAFNAYYARR

SEQ ID NO: 3 - protein, 21 aa, Artificial Sequence
  Description of Artificial Sequence: Synthetic peptide
  N-term Ac
  MOD_RES (9)..(9): Alpha-Me S5-pentenyl-alanine olefin amino acid connected by an all-carbon crosslinker comprising one double bond
  MISC_FEATURE (9)..(13): Crosslink between residues
  MOD_RES (13)..(13): Alpha-Me S5-pentenyl-alanine olefin amino acid connected by an all-carbon crosslinker comprising one double bond
  C-term NH2
IWIAQELRAIEDAFNAYYARR

SEQ ID NO: 4 - protein, 21 aa, Artificial Sequence
  Description of Artificial Sequence: Synthetic peptide
  N-term FITC
  C-term NH2
IWIAQELRRIGDEFNAYYARR

SEQ ID NO: 5 - protein, 21 aa, Artificial Sequence
  Description of Artificial Sequence: Synthetic peptide
  N-term FITC
  MOD_RES (9)..(9): Alpha-Me S5-pentenyl-alanine olefin amino acid connected by an all-carbon crosslinker comprising one double bond
  MISC_FEATURE (9)..(13): Crosslink between residues
  MOD_RES (13)..(13): Alpha-Me S5-pentenyl-alanine olefin amino acid connected by an all-carbon crosslinker comprising one double bond
  C-term NH2
IWIAQELRAIGDAFNAYYARR

SEQ ID NO: 6 - protein, 21 aa, Artificial Sequence
  Description of Artificial Sequence: Synthetic peptide
  N-term FITC
  MOD_RES (9)..(9): Alpha-Me S5-pentenyl-alanine olefin amino acid connected by an all-carbon crosslinker comprising one double bond
  MISC_FEATURE (9)..(13): Crosslink between residues
  MOD_RES (13)..(13): Alpha-Me S5-pentenyl-alanine olefin amino acid connected by an all-carbon crosslinker comprising one double bond
  C-term NH2
IWIAQELRAIEDAFNAYYARR

SEQ ID NO: 7 - protein, 21 aa, Artificial Sequence
  Description of Artificial Sequence: Synthetic peptide
  N-term Ac
  MOD_RES (9)..(9): Alpha-Me S5-pentenyl-alanine olefin amino acid connected by an all-carbon crosslinker comprising one double bond
  MISC_FEATURE (9)..(13): Crosslink between residues
  MOD_RES (13)..(13): Alpha-Me S5-pentenyl-alanine olefin amino acid connected by an all-carbon crosslinker comprising one double bond
  C-term NH2
IWIAQQLRAIGDAFNAYYARR

SEQ ID NO: 8 - protein, 21 aa, Artificial Sequence
  Description of Artificial Sequence: Synthetic peptide
  N-term Ac
  MOD_RES (9)..(9): Alpha-Me S5-pentenyl-alanine olefin amino acid connected by an all-carbon crosslinker comprising one double bond
  MISC_FEATURE (9)..(13): Crosslink between residues
  MOD_RES (13)..(13): Alpha-Me S5-pentenyl-alanine olefin amino acid connected by an all-carbon crosslinker comprising one double bond
  C-term NH2
RWIAQQLRAIGDAFNAYYARR

SEQ ID NO: 9 - protein, 21 aa, Artificial Sequence
  Description of Artificial Sequence: Synthetic peptide
  N-term Ac
  MOD_RES (9)..(9): Alpha-Me S5-pentenyl-alanine olefin amino acid connected by an all-carbon crosslinker comprising one double bond
  MISC_FEATURE (9)..(13): Crosslink between residues
  MOD_RES (13)..(13): Alpha-Me S5-pentenyl-alanine olefin amino acid connected by an all-carbon crosslinker comprising one double bond
  C-term NH2
IRIAQQLRAIGDAFNAYYARR

SEQ ID NO: 10 - protein, 21 aa, Artificial Sequence
  Description of Artificial Sequence: Synthetic peptide
  N-term Ac
  MOD_RES (9)..(9): Alpha-Me S5-pentenyl-alanine olefin amino acid connected by an all-carbon crosslinker comprising one double bond
  MISC_FEATURE (9)..(13): Crosslink between residues
  MOD_RES (13)..(13): Alpha-Me S5-pentenyl-alanine olefin amino acid connected by an all-carbon crosslinker comprising one double bond
  C-term NH2
RRIAQQLRAIGDAFNAYYARR

SEQ ID NO: 11 - protein, 22 aa, Artificial Sequence
  Description of Artificial Sequence: Synthetic peptide
  N-term Ac
  MOD_RES (10)..(10): Alpha-Me S5-pentenyl-alanine olefin amino acid connected by an all-carbon crosslinker comprising one double bond
  MISC_FEATURE (10)..(14): Crosslink between residues
  MOD_RES (14)..(14): Alpha-Me S5-pentenyl-alanine olefin amino acid connected by an all-carbon crosslinker comprising one double bond
  C-term NH2
EIWIAQQLRAIGDAFNAYYARR

SEQ ID NO: 12 - protein, 22 aa, Artificial Sequence
  Description of Artificial Sequence: Synthetic peptide
  N-term Ac
  MOD_RES (10)..(10): Alpha-Me S5-pentenyl-alanine olefin amino acid connected by an all-carbon crosslinker comprising one double bond
  MISC_FEATURE (10)..(14): Crosslink between residues
  MOD_RES (14)..(14): Alpha-Me S5-pentenyl-alanine olefin amino acid connected by an all-carbon crosslinker comprising one double bond
  C-term NH2
ERRIAQQLRAIGDAFNAYYARR

SEQ ID NO: 13 - protein, 21 aa, Artificial Sequence
  Description of Artificial Sequence: Synthetic peptide
  N-term Ac
  MOD_RES (9)..(9): Alpha-Me S5-pentenyl-alanine olefin amino acid connected by an all-carbon crosslinker comprising one double bond
  MISC_FEATURE (9)..(13): Crosslink between residues
  MOD_RES (13)..(13): Alpha-Me S5-pentenyl-alanine olefin amino acid connected by an all-carbon crosslinker comprising one double bond
  C-term NH2
IRIAQELRAIGDAFNAYYARR

SEQ ID NO: 14 - protein, 21 aa, Artificial Sequence
  Description of Artificial Sequence: Synthetic peptide
  N-term Ac
  MOD_RES (9)..(9): Alpha-Me S5-pentenyl-alanine olefin amino acid connected by an all-carbon crosslinker comprising one double bond
  MISC_FEATURE (9)..(13): Crosslink between residues
  MOD_RES (13)..(13): Alpha-Me S5-pentenyl-alanine olefin amino acid connected by an all-carbon crosslinker comprising one double bond
  C-term NH2
RWIAQELRAIGDAFNAYYARR

SEQ ID NO: 15 - protein, 21 aa, Artificial Sequence
  Description of Artificial Sequence: Synthetic peptide
  N-term Ac
  MOD_RES (9)..(9): Alpha-Me S5-pentenyl-alanine olefin amino acid connected by an all-carbon crosslinker comprising one double bond
  MISC_FEATURE (9)..(13): Crosslink between residues
  MOD_RES (13)..(13): Alpha-Me S5-pentenyl-alanine olefin amino acid connected by an all-carbon crosslinker comprising one double bond
  C-term NH2
RRIAQELRAIGDAFNAYYARR

SEQ ID NO: 16 - protein, 22 aa, Artificial Sequence
  Description of Artificial Sequence: Synthetic peptide
  N-term Ac
  MOD_RES (10)..(10): Alpha-Me S5-pentenyl-alanine olefin amino acid connected by an all-carbon crosslinker comprising one double bond
  MISC_FEATURE (10)..(14): Crosslink between residues
  MOD_RES (14)..(14): Alpha-Me S5-pentenyl-alanine olefin amino acid connected by an all-carbon crosslinker comprising one double bond
  C-term NH2
EIWIAQELRAIGDAFNAYYARR

SEQ ID NO: 17 - protein, 22 aa, Artificial Sequence
  Description of Artificial Sequence: Synthetic peptide
  N-term Ac
  MOD_RES (10)..(10): Alpha-Me S5-pentenyl-alanine olefin amino acid connected by an all-carbon crosslinker comprising one double bond
  MISC_FEATURE (10)..(14): Crosslink between residues
  MOD_RES (14)..(14): Alpha-Me S5-pentenyl-alanine olefin amino acid connected by an all-carbon crosslinker comprising one double bond
  C-term NH2
ERWIAQELRAIGDAFNAYYARR

SEQ ID NO: 18 - protein, 22 aa, Artificial Sequence
  Description of Artificial Sequence: Synthetic peptide
  N-term Ac
  MOD_RES (10)..(10): Alpha-Me S5-pentenyl-alanine olefin amino acid connected by an all-carbon crosslinker comprising one double bond
  MISC_FEATURE (10)..(14): Crosslink between residues
  MOD_RES (14)..(14): Alpha-Me S5-pentenyl-alanine olefin amino acid connected by an all-carbon crosslinker comprising one double bond
  C-term NH2
EIRIAQELRAIGDAFNAYYARR

SEQ ID NO: 19 - protein, 22 aa, Artificial Sequence
  Description of Artificial Sequence: Synthetic peptide
  N-term Ac
  MOD_RES (10)..(10): Alpha-Me S5-pentenyl-alanine olefin amino acid connected by an all-carbon crosslinker comprising one double bond
  MISC_FEATURE (10)..(14): Crosslink between residues
  MOD_RES (14)..(14): Alpha-Me S5-pentenyl-alanine olefin amino acid connected by an all-carbon crosslinker comprising one double bond
  C-term NH2
ERRIAQELRAIGDAFNAYYARR

SEQ ID NO: 20 - protein, 21 aa, Artificial Sequence
  Description of Artificial Sequence: Synthetic peptide
  N-term PEG1
  MOD_RES (9)..(9): Alpha-Me S5-pentenyl-alanine olefin amino acid connected by an all-carbon crosslinker comprising one double bond
  MISC_FEATURE (9)..(13): Crosslink between residues
  MOD_RES (13)..(13): Alpha-Me S5-pentenyl-alanine olefin amino acid connected by an all-carbon crosslinker comprising one double bond
  C-term NH2
IWIAQELRAIGDAFNAYYARR

SEQ ID NO: 21 - protein, 21 aa, Artificial Sequence
  Description of Artificial Sequence: Synthetic peptide
  N-term PEG5
  MOD_RES (9)..(9): Alpha-Me S5-pentenyl-alanine olefin amino acid connected by an all-carbon crosslinker comprising one double bond
  MISC_FEATURE (9)..(13): Crosslink between residues
  MOD_RES (13)..(13): Alpha-Me S5-pentenyl-alanine olefin amino acid connected by an all-carbon crosslinker comprising one double bond
  C-term NH2
IWIAQELRAIGDAFNAYYARR

SEQ ID NO: 22 - protein, 21 aa, Artificial Sequence
  Description of Artificial Sequence: Synthetic peptide
  N-term PEG11
  MOD_RES (9)..(9): Alpha-Me S5-pentenyl-alanine olefin amino acid connected by an all-carbon crosslinker comprising one double bond
  MISC_FEATURE (9)..(13): Crosslink between residues
  MOD_RES (13)..(13): Alpha-Me S5-pentenyl-alanine olefin amino acid connected by an all-carbon crosslinker comprising one double bond
  C-term NH2
IWIAQELRAIGDAFNAYYARR

SEQ ID NO: 23 - protein, 21 aa, Artificial Sequence
  Description of Artificial Sequence: Synthetic peptide
  N-term Ac
  MOD_RES (9)..(9): Alpha-Me S5-pentenyl-alanine olefin amino acid connected by an all-carbon crosslinker comprising one double bond
  MISC_FEATURE (9)..(13): Crosslink between residues
  MOD_RES (13)..(13): Alpha-Me S5-pentenyl-alanine olefin amino acid connected by an all-carbon crosslinker comprising one double bond
  C-term NH2
IWIAQELRAIGDAFNASYARR

SEQ ID NO: 24 - protein, 21 aa, Artificial Sequence
  Description of Artificial Sequence: Synthetic peptide
  N-term Ac
  MOD_RES (9)..(9): Alpha-Me S5-pentenyl-alanine olefin amino acid connected by an all-carbon crosslinker comprising one double bond
  MISC_FEATURE (9)..(13): Crosslink between residues
  MOD_RES (13)..(13): Alpha-Me S5-pentenyl-alanine olefin amino acid connected by an all-carbon crosslinker comprising one double bond
  C-term NH2
RRIAQELRAIGDAFNASYARR

SEQ ID NO: 25 - protein, 22 aa, Artificial Sequence
  Description of Artificial Sequence: Synthetic peptide
  N-term Ac
  MOD_RES (10)..(10): Alpha-Me S5-pentenyl-alanine olefin amino acid connected by an all-carbon crosslinker comprising one double bond
  MISC_FEATURE (10)..(14): Crosslink between residues
  MOD_RES (14)..(14): Alpha-Me S5-pentenyl-alanine olefin amino acid connected by an all-carbon crosslinker comprising one double bond
  C-term NH2
ERRIAQELRAIGDAFNASYARR

SEQ ID NO: 26 - protein, 20 aa, Artificial Sequence
  Description of Artificial Sequence: Synthetic peptide
  N-term Ac
  MOD_RES (9)..(9): Alpha-Me S5-pentenyl-alanine olefin amino acid connected by an all-carbon crosslinker comprising one double bond
  MISC_FEATURE (9)..(13): Crosslink between residues
  MOD_RES (13)..(13): Alpha-Me S5-pentenyl-alanine olefin amino acid connected by an all-carbon crosslinker comprising one double bond
  C-term NH2
RRIAQELRAIGDAFNAYYAR

SEQ ID NO: 27 - protein, 19 aa, Artificial Sequence
  Description of Artificial Sequence: Synthetic peptide
  N-term Ac
  MOD_RES (9)..(9): Alpha-Me S5-pentenyl-alanine olefin amino acid connected by an all-carbon crosslinker comprising one double bond
  MISC_FEATURE (9)..(13): Crosslink between residues
  MOD_RES (13)..(13): Alpha-Me S5-pentenyl-alanine olefin amino acid connected by an all-carbon crosslinker comprising one double bond
  C-term NH2
RRIAQELRAIGDAFNAYYA

SEQ ID NO: 28 - protein, 19 aa, Artificial Sequence
  Description of Artificial Sequence: Synthetic peptide
  N-term Ac
  MOD_RES (9)..(9): Alpha-Me S5-pentenyl-alanine olefin amino acid connected by an all-carbon crosslinker comprising one double bond
  MISC_FEATURE (9)..(13): Crosslink between residues
  MOD_RES (13)..(13): Alpha-Me S5-pentenyl-alanine olefin amino acid connected by an all-carbon crosslinker comprising one double bond
  MOD_RES (19)..(19): 2-aminoisobutyric acid
  C-term NH2
RRIAQELRAIGDAFNAYYX

SEQ ID NO: 29 - protein, 19 aa, Artificial Sequence
  Description of Artificial Sequence: Synthetic peptide
  N-term Ac
  MOD_RES (9)..(9): Alpha-Me S5-pentenyl-alanine olefin amino acid connected by an all-carbon crosslinker comprising one double bond
  MISC_FEATURE (9)..(13): Crosslink between residues
  MOD_RES (13)..(13): Alpha-Me S5-pentenyl-alanine olefin amino acid connected by an all-carbon crosslinker comprising one double bond
  MOD_RES (19)..(19): 2-aminoisobutyric acid
  C-term NH2
RRIAQELRAIGDAFNASYX

SEQ ID NO: 30 - protein, 20 aa, Artificial Sequence
  Description of Artificial Sequence: Synthetic peptide
  N-term Ac
  MOD_RES (9)..(9): Alpha-Me S5-pentenyl-alanine olefin amino acid connected by an all-carbon crosslinker comprising one double bond
  MISC_FEATURE (9)..(13): Crosslink between residues
  MOD_RES (11)..(11): 2-aminoisobutyric acid
  MOD_RES (13)..(13): Alpha-Me S5-pentenyl-alanine olefin amino acid connected by an all-carbon crosslinker comprising one double bond
  C-term NH2
IWIAQELRAIXDAFNAYYAR

SEQ ID NO: 31 - protein, 20 aa, Artificial Sequence
  Description of Artificial Sequence: Synthetic peptide
  N-term Ac
  MOD_RES (9)..(9): Modified alanine amino acid connected by a reduced olefin crosslinker
  MISC_FEATURE (9)..(13): Crosslink between residues
  MOD_RES (11)..(11): 2-aminoisobutyric acid
  MOD_RES (13)..(13): Modified alanine amino acid connected by a reduced olefin crosslinker
  C-term NH2
IWIAQELRAIXDAFNAYYAR

SEQ ID NO: 32 - protein, 21 aa, Artificial Sequence
  Description of Artificial Sequence: Synthetic peptide
  N-term Ac
  C-term NH2
IRIAQELRRIGDEFNETYTRR

SEQ ID NO: 33 - protein, 21 aa, Artificial Sequence
  Description of Artificial Sequence: Synthetic peptide
  N-term Ac
  MOD_RES (9)..(9): Alpha-Me S5-pentenyl-alanine olefin amino acid connected by an all-carbon crosslinker comprising one double bond
  MISC_FEATURE (9)..(13): Crosslink between residues
  MOD_RES (13)..(13): Alpha-Me S5-pentenyl-alanine olefin amino acid connected by an all-carbon crosslinker comprising one double bond
  C-term NH2
IRIAQELRAIGDAFNETYTRR

SEQ ID NO: 34 - protein, 21 aa, Artificial Sequence
  Description of Artificial Sequence: Synthetic peptide
  N-term Ac
  MOD_RES (9)..(9): Alpha-Me S5-pentenyl-alanine olefin amino acid connected by an all-carbon crosslinker comprising one double bond
  MISC_FEATURE (9)..(13): Crosslink between residues
  MOD_RES (13)..(13): Alpha-Me S5-pentenyl-alanine olefin amino acid connected by an all-carbon crosslinker comprising one double bond
  C-term NH2
IRIAQELRAIEDAFNETYTRR

SEQ ID NO: 35 - protein, 21 aa, Artificial Sequence
  Description of Artificial Sequence: Synthetic peptide
  N-term Ac
  MOD_RES (9)..(9): Alpha-Me S5-pentenyl-alanine olefin amino acid not connected by any crosslinker
  MOD_RES (13)..(13): Alpha-Me S5-pentenyl-alanine olefin amino acid not connected by any crosslinker
  C-term NH2
IWIAQELRAIGDAFNAYYARR

SEQ ID NO: 36 - protein, 21 aa, Artificial Sequence
  Description of Artificial Sequence: Synthetic peptide
  N-term Pr
  MOD_RES (9)..(9): Alpha-Me S5-pentenyl-alanine olefin amino acid connected by an all-carbon crosslinker comprising one double bond
  MISC_FEATURE (9)..(13): Crosslink between residues
  MOD_RES (13)..(13): Alpha-Me S5-pentenyl-alanine olefin amino acid connected by an all-carbon crosslinker comprising one double bond
  C-term NH2
IWIAQELRAIGDAFNAYYARR

SEQ ID NO: 37 - protein, 21 aa, Artificial Sequence
  Description of Artificial Sequence: Synthetic peptide
  N-term Ac
  MOD_RES (9)..(9): Alpha-Me S5-pentenyl-alanine olefin amino acid connected by an all-carbon crosslinker comprising one double bond
  MISC_FEATURE (9)..(13): Crosslink between residues
  MOD_RES (11)..(11): 2-aminoisobutyric acid
  MOD_RES (13)..(13): Alpha-Me S5-pentenyl-alanine olefin amino acid connected by an all-carbon crosslinker comprising one double bond
  C-term NH2
IWIAQELRAIXDAFNAYYARR

SEQ ID NO: 38 - protein, 21 aa, Artificial Sequence
  Description of Artificial Sequence: Synthetic peptide
  N-term Ac
  MOD_RES (9)..(9): Modified alanine amino acid connected by a reduced olefin crosslinker
  MISC_FEATURE (9)..(13): Crosslink between residues
  MOD_RES (11)..(11): 2-aminoisobutyric acid
  MOD_RES (13)..(13): Modified alanine amino acid connected by a reduced olefin crosslinker
  C-term NH2
IWIAQELRAIXDAFNAYYARR

SEQ ID NO: 39 - protein, 21 aa, Artificial Sequence
  Description of Artificial Sequence: Synthetic peptide
  N-term Ac
  MOD_RES (9)..(9): Alpha-Me S5-pentenyl-alanine olefin amino acid connected by an all-carbon crosslinker comprising one double bond
  MISC_FEATURE (9)..(13): Crosslink between residues
  MOD_RES (13)..(13): Alpha-Me S5-pentenyl-alanine olefin amino acid connected by an all-carbon crosslinker comprising one double bond
  C-term NH2
IWIAQELRAIGDAANAYYARR

SEQ ID NO: 40 - protein, 21 aa, Artificial Sequence
  Description of Artificial Sequence: Synthetic peptide
  N-term Ac
  MOD_RES (9)..(9): Alpha-Me S5-pentenyl-alanine olefin amino acid connected by an all-carbon crosslinker comprising one double bond
  MISC_FEATURE (9)..(13): Crosslink between residues
  MOD_RES (13)..(13): Alpha-Me S5-pentenyl-alanine olefin amino acid connected by an all-carbon crosslinker comprising one double bond
  C-term NH2
IWIAQELRAIGDAFAAYYARR

SEQ ID NO: 41 - protein, 21 aa, Artificial Sequence
  Description of Artificial Sequence: Synthetic peptide
  N-term Ac
  MOD_RES (9)..(9): Alpha-Me S5-pentenyl-alanine olefin amino acid connected by an all-carbon crosslinker comprising one double bond
  MISC_FEATURE (9)..(13): Crosslink between residues
  MOD_RES (13)..(13): Alpha-Me S5-pentenyl-alanine olefin amino acid connected by an all-carbon crosslinker comprising one double bond
  C-term NH2
IWIAQELRAIGDAAAAYYARR

SEQ ID NO: 42 - protein, 21 aa, Artificial Sequence
  Description of Artificial Sequence: Synthetic peptide
  N-term Ac
  MOD_RES (9)..(9): Modified alanine amino acid connected by a reduced olefin crosslinker
  MISC_FEATURE (9)..(13): Crosslink between residues
  MOD_RES (13)..(13): Modified alanine amino acid connected by a reduced olefin crosslinker
  C-term NH2
IWIAQELRAIGDAFNAYYARR

SEQ ID NO: 43 - protein, 21 aa, Artificial Sequence
  Description of Artificial Sequence: Synthetic peptide
  N-term Ac
  MOD_RES (9)..(9): Alpha-Me S5-pentenyl-alanine olefin amino acid connected by an all-carbon crosslinker comprising one double bond
  MISC_FEATURE (9)..(13): Crosslink between residues
  MOD_RES (13)..(13): Alpha-Me S5-pentenyl-alanine olefin amino acid connected by an all-carbon crosslinker comprising one double bond
  C-term NH2
AWIAQELRAIGDAFNAYYARR

SEQ ID NO: 44 - protein, 21 aa, Artificial Sequence
  Description of Artificial Sequence: Synthetic peptide
  N-term Ac
  MOD_RES (9)..(9): Alpha-Me S5-pentenyl-alanine olefin amino acid connected by an all-carbon crosslinker comprising one double bond
  MISC_FEATURE (9)..(13): Crosslink between residues
  MOD_RES (13)..(13): Alpha-Me S5-pentenyl-alanine olefin amino acid connected by an all-carbon crosslinker comprising one double bond
  C-term NH2
IWAAQELRAIGDAFNAYYARR

SEQ ID NO: 45 - protein, 21 aa, Artificial Sequence
  Description of Artificial Sequence: Synthetic peptide
  N-term Ac
  MOD_RES (9)..(9): Alpha-Me S5-pentenyl-alanine olefin amino acid connected by an all-carbon crosslinker comprising one double bond
  MISC_FEATURE (9)..(13): Crosslink between residues
  MOD_RES (13)..(13): Alpha-Me S5-pentenyl-alanine olefin amino acid connected by an all-carbon crosslinker comprising one double bond
  C-term NH2
AWAAQELRAIGDAFNAYYARR

SEQ ID NO: 46 - protein, 21 aa, Artificial Sequence
  Description of Artificial Sequence: Synthetic peptide
  N-term Ac
  MOD_RES (4)..(4): 2-aminoisobutyric acid
  MOD_RES (9)..(9): Alpha-Me S5-pentenyl-alanine olefin amino acid connected by an all-carbon crosslinker comprising one double bond
  MISC_FEATURE (9)..(13): Crosslink between residues
  MOD_RES (13)..(13): Alpha-Me S5-pentenyl-alanine olefin amino acid connected by an all-carbon crosslinker comprising one double bond
  C-term NH2
IWIXQELRAIGDAFNAYYARR

SEQ ID NO: 47 - protein, 21 aa, Artificial Sequence
  Description of Artificial Sequence: Synthetic peptide
  N-term Ac
  MOD_RES (9)..(9): Alpha-Me S5-pentenyl-alanine olefin amino acid connected by an all-carbon crosslinker comprising one double bond
  MISC_FEATURE (9)..(13): Crosslink between residues
  MOD_RES (13)..(13): Alpha-Me S5-pentenyl-alanine olefin amino acid connected by an all-carbon crosslinker comprising one double bond
  C-term NH2
IWIAQELRAIGDAFNAAYARR

SEQ ID NO: 48 - protein, 21 aa, Artificial Sequence
  Description of Artificial Sequence: Synthetic peptide
  N-term Ac
  MOD_RES (9)..(9): Alpha-Me S5-pentenyl-alanine olefin amino acid connected by an all-carbon crosslinker comprising one double bond
  MISC_FEATURE (9)..(13): Crosslink between residues
  MOD_RES (13)..(13): Alpha-Me S5-pentenyl-alanine olefin amino acid connected by an all-carbon crosslinker comprising one double bond
  C-term NH2
IWIAQELRAIGDAFNAYAARR

SEQ ID NO: 49 - protein, 21 aa, Artificial Sequence
  Description of Artificial Sequence: Synthetic peptide
  N-term Ac
  MOD_RES (9)..(9): Alpha-Me S5-pentenyl-alanine olefin amino acid connected by an all-carbon crosslinker comprising one double bond
  MISC_FEATURE (9)..(13): Crosslink between residues
  MOD_RES (13)..(13): Alpha-Me S5-pentenyl-alanine olefin amino acid connected by an all-carbon crosslinker comprising one double bond
  C-term NH2
IWIAQELRAIGDAFNAAAARR

SEQ ID NO: 50 - protein, 21 aa, Artificial Sequence
  Description of Artificial Sequence: Synthetic peptide
  N-term Ac
  MOD_RES (9)..(9): Alpha-Me S5-pentenyl-alanine olefin amino acid connected by an all-carbon crosslinker comprising one double bond
  MISC_FEATURE (9)..(13): Crosslink between residues
  MOD_RES (13)..(13): Alpha-Me S5-pentenyl-alanine olefin amino acid connected by an all-carbon crosslinker comprising one double bond
  MOD_RES (19)..(19): 2-aminoisobutyric acid
  C-term NH2
IWIAQELRAIGDAFNAYYXRR

SEQ ID NO: 51 - protein, 21 aa, Artificial Sequence
  Description of Artificial Sequence: Synthetic peptide
  N-term Ac
  MOD_RES (9)..(9): Modified alanine amino acid connected by a reduced olefin crosslinker
  MISC_FEATURE (9)..(13): Crosslink between residues
  MOD_RES (11)..(11): 2-aminoisobutyric acid
  MOD_RES (13)..(13): Modified alanine amino acid connected by a reduced olefin crosslinker
  C-term NH2
IAIAQELRAIXDAFNAYYARR

SEQ ID NO: 52 - protein, 21 aa, Artificial Sequence
  Description of Artificial Sequence: Synthetic peptide
  N-term Ac
  MOD_RES (9)..(9): Alpha-Me S5-pentenyl-alanine olefin amino acid connected by an all-carbon crosslinker comprising one double bond
  MISC_FEATURE (9)..(13): Crosslink between residues
  MOD_RES (11)..(11): 2-aminoisobutyric acid
  MOD_RES (13)..(13): Alpha-Me S5-pentenyl-alanine olefin amino acid connected by an all-carbon crosslinker comprising one double bond
  C-term NH2
IAIAQELRAIXDAFNAYYARR

SEQ ID NO: 53 - protein, 21 aa, Artificial Sequence
  Description of Artificial Sequence: Synthetic peptide
  N-term Ac
  MOD_RES (7)..(7): 2-aminoisobutyric acid
  MOD_RES (12)..(12): Alpha-Me S5-pentenyl-alanine olefin amino acid connected by an all-carbon crosslinker comprising one double bond
  MISC_FEATURE (12)..(16): Crosslink between residues
  MOD_RES (16)..(16): Alpha-Me S5-pentenyl-alanine olefin amino acid connected by an all-carbon crosslinker comprising one double bond
  MOD_RES (17)..(17): Norleucine
  C-term NH2
DIIRNIXRHLAAVGDALDRSI

SEQ ID NO: 54 - protein, 21 aa, Artificial Sequence
  Description of Artificial Sequence: Synthetic peptide
  N-term Ac
  MOD_RES (12)..(12): Alpha-Me S5-pentenyl-alanine olefin amino acid connected by an all-carbon crosslinker comprising one double bond
  MISC_FEATURE (12)..(16): Crosslink between residues
  MOD_RES (16)..(16): Alpha-Me S5-pentenyl-alanine olefin amino acid connected by an all-carbon crosslinker comprising one double bond
  MOD_RES (17)..(17): Norleucine
  C-term NH2
DIIRNIARHLAAVGDALDKSI

SEQ ID NO: 55 - protein, 21 aa, Artificial Sequence
  Description of Artificial Sequence: Synthetic peptide
  N-term Ac
  MOD_RES (12)..(12): Alpha-Me S5-pentenyl-alanine olefin amino acid connected by an all-carbon crosslinker comprising one double bond
  MISC_FEATURE (12)..(16): Crosslink between residues
  MOD_RES (16)..(16): Alpha-Me S5-pentenyl-alanine olefin amino acid connected by an all-carbon crosslinker comprising one double bond
  MOD_RES (17)..(17): Norleucine
  C-term NH2
DIIKNIARHLAAVGDALDRSI

SEQ ID NO: 56 - protein, 21 aa, Artificial Sequence
  Description of Artificial Sequence: Synthetic peptide
  N-term Ac
  MOD_RES (17)..(17): Norleucine
  C-term NH2
DIIRNIARHLACVGDCLDRSI

SEQ ID NO: 57 - protein, 21 aa, Artificial Sequence
  Description of Artificial Sequence: Synthetic peptide
  N-term Ac
  MOD_RES (14)..(14): 2-aminoisobutyric acid
  MOD_RES (17)..(17): Norleucine
  C-term NH2
DIIRNIARHLACVXDCLDRSI

SEQ ID NO: 58 - protein, 16 aa, Artificial Sequence
  Description of Artificial Sequence: Synthetic peptide
  N-term Ac
  MOD_RES (9)..(9): Alpha-Me S5-pentenyl-alanine olefin amino acid connected by an all-carbon crosslinker comprising one double bond
  MISC_FEATURE (9)..(13): Crosslink between residues
  MOD_RES (13)..(13): Alpha-Me S5-pentenyl-alanine olefin amino acid connected by an all-carbon crosslinker comprising one double bond
  C-term NH2
IWIAQELRAIGDAFNA

SEQ ID NO: 59 - protein, 18 aa, Artificial Sequence
  Description of Artificial Sequence: Synthetic peptide
  N-term Ac
  MOD_RES (9)..(9): Alpha-Me S5-pentenyl-alanine olefin amino acid connected by an all-carbon crosslinker comprising one double bond
  MISC_FEATURE (9)..(13): Crosslink between residues
  MOD_RES (13)..(13): Alpha-Me S5-pentenyl-alanine olefin amino acid connected by an all-carbon crosslinker comprising one double bond
  C-term NH2
IWIAQELRAIGDAFNRSI

SEQ ID NO: 60 - protein, 21 aa, Artificial Sequence
  Description of Artificial Sequence: Synthetic peptide
  N-term Ac
  MOD_RES (9)..(9): Alpha-Me S5-pentenyl-alanine olefin amino acid connected by an all-carbon crosslinker comprising one double bond
  MISC_FEATURE (9)..(13): Crosslink between residues
  MOD_RES (13)..(13): Alpha-Me S5-pentenyl-alanine olefin amino acid connected by an all-carbon crosslinker comprising one double bond
  C-term NH2
IWIAQELRAIGDAFNRSIARR

SEQ ID NO: 61 - protein, 18 aa, Artificial Sequence
  Description of Artificial Sequence: Synthetic peptide
  N-term Ac
  MOD_RES (9)..(9): Alpha-Me S5-pentenyl-alanine olefin amino acid connected by an all-carbon crosslinker comprising one double bond
  MISC_FEATURE (9)..(13): Crosslink between residues
  MOD_RES (13)..(13): Alpha-Me S5-pentenyl-alanine olefin amino acid connected by an all-carbon crosslinker comprising one double bond
  MOD_RES (14)..(14): Norleucine
  C-term NH2
IWIAQELRAIGDALDRSI

SEQ ID NO: 62 - protein, 18 aa, Artificial Sequence
  Description of Artificial Sequence: Synthetic peptide
  N-term Ac
  MOD_RES (9)..(9): Alpha-Me S5-pentenyl-alanine olefin amino acid connected by an all-carbon crosslinker comprising one double bond
  MISC_FEATURE (9)..(13): Crosslink between residues
  MOD_RES (13)..(13): Alpha-Me S5-pentenyl-alanine olefin amino acid connected by an all-carbon crosslinker comprising one double bond
  MOD_RES (14)..(14): Norleucine
  C-term NH2
IWIAQELRAVGDALDRSI

SEQ ID NO: 63 - protein, 21 aa, Artificial Sequence
  Description of Artificial Sequence: Synthetic peptide
  N-term Ac
  MOD_RES (9)..(9): Alpha-Me S5-pentenyl-alanine olefin amino acid connected by an all-carbon crosslinker comprising one double bond
  MISC_FEATURE (9)..(13): Crosslink between residues
  MOD_RES (13)..(13): Alpha-Me S5-pentenyl-alanine olefin amino acid connected by an all-carbon crosslinker comprising one double bond
  C-term NH2
IWIAQEARAIGAAFNAYYARR

SEQ ID NO: 64 - protein, 20 aa, Artificial Sequence
  Description of Artificial Sequence: Synthetic peptide
  N-term Ac
  MOD_RES (8)..(8): Alpha-Me S5-pentenyl-alanine olefin amino acid connected by an all-carbon crosslinker comprising one double bond
  MISC_FEATURE (8)..(12): Crosslink between residues
  MOD_RES (12)..(12): Alpha-Me S5-pentenyl-alanine olefin amino acid connected by an all-carbon crosslinker comprising one double bond
  C-term NH2
WIAQELRAIGDAFNAYYARR

SEQ ID NO: 65 - protein, 19 aa, Artificial Sequence
  Description of Artificial Sequence: Synthetic peptide
  N-term Ac
  MOD_RES (7)..(7): Alpha-Me S5-pentenyl-alanine olefin amino acid connected by an all-carbon crosslinker comprising one double bond
  MISC_FEATURE (7)..(11): Crosslink between residues
  MOD_RES (11)..(11): Alpha-Me S5-pentenyl-alanine olefin amino acid connected by an all-carbon crosslinker comprising one double bond
  C-term NH2
IAQELRAIGDAFNAYYARR

SEQ ID NO: 66 - protein, 18 aa, Artificial Sequence
  Description of Artificial Sequence: Synthetic peptide
  N-term Ac
  MOD_RES (6)..(6): Alpha-Me S5-pentenyl-alanine olefin amino acid connected by an all-carbon crosslinker comprising one double bond
  MISC_FEATURE (6)..(10): Crosslink between residues
  MOD_RES (10)..(10): Alpha-Me S5-pentenyl-alanine olefin amino acid connected by an all-carbon crosslinker comprising one double bond
  C-term NH2
AQELRAIGDAFNAYYARR

SEQ ID NO: 67 - protein, 17 aa, Artificial Sequence
  Description of Artificial Sequence: Synthetic peptide
  N-term Ac
  MOD_RES (5)..(5): Alpha-Me S5-pentenyl-alanine olefin amino acid connected by an all-carbon crosslinker comprising one double bond
  MISC_FEATURE (5)..(9): Crosslink between residues
  MOD_RES (9)..(9): Alpha-Me S5-pentenyl-alanine olefin amino acid connected by an all-carbon crosslinker comprising one double bond
  C-term NH2
QELRAIGDAFNAYYARR

SEQ ID NO: 68 - protein, 16 aa, Artificial Sequence
  Description of Artificial Sequence: Synthetic peptide
  N-term Ac
  MOD_RES (4)..(4): Alpha-Me S5-pentenyl-alanine olefin amino acid connected by an all-carbon crosslinker comprising one double bond
  MISC_FEATURE (4)..(8): Crosslink between residues
  MOD_RES (8)..(8): Alpha-Me S5-pentenyl-alanine olefin amino acid connected by an all-carbon crosslinker comprising one double bond
  C-term NH2
ELRAIGDAFNAYYARR

SEQ ID NO: 69 - protein, 20 aa, Artificial Sequence
  Description of Artificial Sequence: Synthetic peptide
  N-term Ac
  MOD_RES (9)..(9): Alpha-Me S5-pentenyl-alanine olefin amino acid connected by an all-carbon crosslinker comprising one double bond
  MISC_FEATURE (9)..(13): Crosslink between residues
  MOD_RES (13)..(13): Alpha-Me S5-pentenyl-alanine olefin amino acid connected by an all-carbon crosslinker comprising one double bond
  C-term NH2
IWIAQELRAIGDAFNAYYAR

SEQ ID NO: 70 - protein, 19 aa, Artificial Sequence
  Description of Artificial Sequence: Synthetic peptide
  N-term Ac
  MOD_RES (9)..(9): Alpha-Me S5-pentenyl-alanine olefin amino acid connected by an all-carbon crosslinker comprising one double bond
  MISC_FEATURE (9)..(13): Crosslink between residues
  MOD_RES (13)..(13): Alpha-Me S5-pentenyl-alanine olefin amino acid connected by an all-carbon crosslinker comprising one double bond
  C-term NH2
IWIAQELRAIGDAFNAYYA

SEQ ID NO: 71 - protein, 18 aa, Artificial Sequence
  Description of Artificial Sequence: Synthetic peptide
  N-term Ac
  MOD_RES (9)..(9): Alpha-Me S5-pentenyl-alanine olefin amino acid connected by an all-carbon crosslinker comprising one double bond
  MISC_FEATURE (9)..(13): Crosslink between residues
  MOD_RES (13)..(13): Alpha-Me S5-pentenyl-alanine olefin amino acid connected by an all-carbon crosslinker comprising one double bond
  C-term NH2
IWIAQELRAIGDAFNAYY

SEQ ID NO: 72 - protein, 17 aa, Artificial Sequence
  Description of Artificial Sequence: Synthetic peptide
  N-term Ac
  MOD_RES (9)..(9): Alpha-Me S5-pentenyl-alanine olefin amino acid connected by an all-carbon crosslinker comprising one double bond
  MISC_FEATURE (9)..(13): Crosslink between residues
  MOD_RES (13)..(13): Alpha-Me S5-pentenyl-alanine olefin amino acid connected by an all-carbon crosslinker comprising one double bond
  C-term NH2
IWIAQELRAIGDAFNAY

SEQ ID NO: 73 - protein, 21 aa, Artificial Sequence
  Description of Artificial Sequence: Synthetic peptide
  N-term Ac
  MOD_RES (9)..(9): Alpha-Me S5-pentenyl-alanine olefin amino acid connected by an all-carbon crosslinker comprising one double bond
  MISC_FEATURE (9)..(13): Crosslink between residues
  MOD_RES (13)..(13): Alpha-Me S5-pentenyl-alanine olefin amino acid connected by an all-carbon crosslinker comprising one double bond
  C-term NH2
IAIAQELRAIGDAFNAYYARR

SEQ ID NO: 74 - protein, 21 aa, Artificial Sequence
  Description of Artificial Sequence: Synthetic peptide
  N-term Ac
  MOD_RES (9)..(9): Alpha-Me S5-pentenyl-alanine olefin amino acid connected by an all-carbon crosslinker comprising one double bond
  MISC_FEATURE (9)..(13): Crosslink between residues
  MOD_RES (13)..(13): Alpha-Me S5-pentenyl-alanine olefin amino acid connected by an all-carbon crosslinker comprising one double bond
  C-term NH2
IWIAAELRAIGDAFNAYYARR

SEQ ID NO: 75 - protein, 21 aa, Artificial Sequence
  Description of Artificial Sequence: Synthetic peptide
  N-term Ac
  MOD_RES (9)..(9): Alpha-Me S5-pentenyl-alanine olefin amino acid connected by an all-carbon crosslinker comprising one double bond
  MISC_FEATURE (9)..(13): Crosslink between residues
  MOD_RES (13)..(13): Alpha-Me S5-pentenyl-alanine olefin amino acid connected by an all-carbon crosslinker comprising one double bond
  C-term NH2
IWIAQALRAIGDAFNAYYARR

SEQ ID NO: 76 - protein, 21 aa, Artificial Sequence
  Description of Artificial Sequence: Synthetic peptide
  N-term Ac
  MOD_RES (9)..(9): Alpha-Me S5-pentenyl-alanine olefin amino acid connected by an all-carbon crosslinker comprising one double bond
  MISC_FEATURE (9)..(13): Crosslink between residues
  MOD_RES (13)..(13): Alpha-Me S5-pentenyl-alanine olefin amino acid connected by an all-carbon crosslinker comprising one double bond
  C-term NH2
IWIAQEARAIGDAFNAYYARR

SEQ ID NO: 77 - protein, 21 aa, Artificial Sequence
  Description of Artificial Sequence: Synthetic peptide
  N-term Ac
  MOD_RES (9)..(9): Alpha-Me S5-pentenyl-alanine olefin amino acid connected by an all-carbon crosslinker comprising one double bond
  MISC_FEATURE (9)..(13): Crosslink between residues
  MOD_RES (13)..(13): Alpha-Me S5-pentenyl-alanine olefin amino acid connected by an all-carbon crosslinker comprising one double bond
  C-term NH2
IWIAQELAAIGDAFNAYYARR

SEQ ID NO: 78 - protein, 21 aa, Artificial Sequence
  Description of Artificial Sequence: Synthetic peptide
  N-term Ac
  MOD_RES (9)..(9): Alpha-Me S5-pentenyl-alanine olefin amino acid connected by an all-carbon crosslinker comprising one double bond
  MISC_FEATURE (9)..(13): Crosslink between residues
  MOD_RES (13)..(13): Alpha-Me S5-pentenyl-alanine olefin amino acid connected by an all-carbon crosslinker comprising one double bond
  C-term NH2
IWIAQELRAAGDAFNAYYARR

SEQ ID NO: 79 - protein, 21 aa, Artificial Sequence
  Description of Artificial Sequence: Synthetic peptide
  N-term Ac
  MOD_RES (9)..(9): Alpha-Me S5-pentenyl-alanine olefin amino acid connected by an all-carbon crosslinker comprising one double bond
  MISC_FEATURE (9)..(13): Crosslink between residues
  MOD_RES (13)..(13): Alpha-Me S5-pentenyl-alanine olefin amino acid connected by an all-carbon crosslinker comprising one double bond
  C-term NH2
IWIAQELRAIADAFNAYYARR

SEQ ID NO: 80 - protein, 21 aa, Artificial Sequence
  Description of Artificial Sequence: Synthetic peptide
  N-term Ac
  MOD_RES (9)..(9): Alpha-Me S5-pentenyl-alanine olefin amino acid connected by an all-carbon crosslinker comprising one double bond
  MISC_FEATURE (9)..(13): Crosslink between residues
  MOD_RES (13)..(13): Alpha-Me S5-pentenyl-alanine olefin amino acid connected by an all-carbon crosslinker comprising one double bond
  C-term NH2
IWIAQELRAIGAAFNAYYARR

SEQ ID NO: 81 - protein, 21 aa, Artificial Sequence
  Description of Artificial Sequence: Synthetic peptide
  N-term Ac
  MOD_RES (9)..(9): Alpha-Me S5-pentenyl-alanine olefin amino acid connected by an all-carbon crosslinker comprising one double bond
  MISC_FEATURE (9)..(13): Crosslink between residues
  MOD_RES (13)..(13): Alpha-Me S5-pentenyl-alanine olefin amino acid connected by an all-carbon crosslinker comprising one double bond
  C-term NH2
IWIAQELRAIGDAFNAYYAAR

SEQ ID NO: 82 - protein, 21 aa, Artificial Sequence
  Description of Artificial Sequence: Synthetic peptide
  N-term Ac
  MOD_RES (9)..(9): Alpha-Me S5-pentenyl-alanine olefin amino acid connected by an all-carbon crosslinker comprising one double bond
  MISC_FEATURE (9)..(13): Crosslink between residues
  MOD_RES (13)..(13): Alpha-Me S5-pentenyl-alanine olefin amino acid connected by an all-carbon crosslinker comprising one double bond
  C-term NH2
IWIAQELRAIGDAFNAYYARA

SEQ ID NO: 83 - protein, 21 aa, Artificial Sequence
  Description of Artificial Sequence: Synthetic peptide
  N-term Pr
  MOD_RES (9)..(9): Alpha-Me S5-pentenyl-alanine olefin amino acid connected by an all-carbon crosslinker comprising one double bond
  MISC_FEATURE (9)..(13): Crosslink between residues
  MOD_RES (13)..(13): Alpha-Me S5-pentenyl-alanine olefin amino acid connected by an all-carbon crosslinker comprising one double bond
  C-term NH2
RNIARHLAAVGDAFNAYYARR

SEQ ID NO: 84 - protein, 21 aa, Artificial Sequence
  Description of Artificial Sequence: Synthetic peptide
  N-term Pr
  MOD_RES (8)..(8): 2-aminoisobutyric acid
  MOD_RES (9)..(9): Alpha-Me S5-pentenyl-alanine olefin amino acid connected by an all-carbon crosslinker comprising one double bond
  MISC_FEATURE (9)..(13): Crosslink between residues
  MOD_RES (13)..(13): Alpha-Me S5-pentenyl-alanine olefin amino acid connected by an all-carbon crosslinker comprising one double bond
  C-term NH2
RNIARHLXAVGDAFNAYYARR

SEQ ID NO: 85 - protein, 21 aa, Artificial Sequence
  Description of Artificial Sequence: Synthetic peptide
  N-term Pr
  MOD_RES (4)..(4): 2-aminoisobutyric acid
  MOD_RES (8)..(8): 2-aminoisobutyric acid
  MOD_RES (9)..(9): Alpha-Me S5-pentenyl-alanine olefin amino acid connected by an all-carbon crosslinker comprising one double bond
  MISC_FEATURE (9)..(13): Crosslink between residues
  MOD_RES (13)..(13): Alpha-Me S5-pentenyl-alanine olefin amino acid connected by an all-carbon crosslinker comprising one double bond
  C-term NH2
RNIXRHLXAVGDAFNAYYARR

SEQ ID NO: 86 - protein, 21 aa, Artificial Sequence
  Description of Artificial Sequence: Synthetic peptide
  N-term Pr
  MOD_RES (3)..(3): Cyclohexyl-Gly
  MOD_RES (9)..(9): Alpha-Me S5-pentenyl-alanine olefin amino acid connected by an all-carbon crosslinker comprising one double bond
  MISC_FEATURE (9)..(13): Crosslink between residues
  MOD_RES (11)..(11): 2-aminoisobutyric acid
  MOD_RES (13)..(13): Alpha-Me S5-pentenyl-alanine olefin amino acid connected by an all-carbon crosslinker comprising one double bond
  C-term NH2
RNGARHLAAVXDAFNAYYARR

SEQ ID NO: 87 - protein, 21 aa, Artificial Sequence
  Description of Artificial Sequence: Synthetic peptide
  N-term Pr
  MOD_RES (3)..(3): Cyclohexyl-Ala
  MOD_RES (9)..(9): Alpha-Me S5-pentenyl-alanine olefin amino acid connected by an all-carbon crosslinker comprising one double bond
  MISC_FEATURE (9)..(13): Crosslink between residues
  MOD_RES (11)..(11): 2-aminoisobutyric acid
  MOD_RES (13)..(13): Alpha-Me S5-pentenyl-alanine olefin amino acid connected by an all-carbon crosslinker comprising one double bond
  C-term NH2
RNAARHLAAVXDAFNAYYARR

SEQ ID NO: 88 - protein, 22 aa, Artificial Sequence
  Description of Artificial Sequence: Synthetic peptide
  N-term FITC
  MOD_RES (1)..(1): Beta-Ala
  C-term NH2
AIWIAQELRRIGDEFNAYYARR

SEQ ID NO: 89 - protein, 22 aa, Artificial Sequence
  Description of Artificial Sequence: Synthetic peptide
  N-term Biotin
  MOD_RES (1)..(1): 6-aminohexanoic acid
  C-term NH2
XIWIAQELRRIGDEFNAYYARR

SEQ ID NO: 90 - protein, 23 aa, Artificial Sequence
  Description of Artificial Sequence: Synthetic peptide
  N-term KLH
  MOD_RES (2)..(2): Beta-Ala
  C-term NH2
CAIWIAQELRRIGDEFNAYYARR

SEQ ID NO: 91 - protein, 23 aa, Artificial Sequence
  Description of Artificial Sequence: Synthetic peptide
  N-term OVA
  MOD_RES (2)..(2): Beta-Ala
  C-term NH2
CAIWIAQELRRIGDEFNAYYARR

SEQ ID NO: 92 - protein, 22 aa, Artificial Sequence
  Description of Artificial Sequence: Synthetic peptide
  N-term FITC
  MOD_RES (1)..(1): Beta-Ala
  MOD_RES (10)..(10): Alpha-Me S5-pentenyl-alanine olefin amino acid connected by an all-carbon crosslinker comprising one double bond
  MISC_FEATURE (10)..(14): Crosslink between residues
  MOD_RES (14)..(14): Alpha-Me S5-pentenyl-alanine olefin amino acid connected by an all-carbon crosslinker comprising one double bond
  C-term NH2
AIWIAQELRAIGDAFNAYYARR

SEQ ID NO: 93 - protein, 22 aa, Artificial Sequence
  Description of Artificial Sequence: Synthetic peptide
  N-term Biotin
  MOD_RES (1)..(1): 6-aminohexanoic acid
  MOD_RES (10)..(10): Alpha-Me S5-pentenyl-alanine olefin amino acid connected by an all-carbon crosslinker comprising one double bond
  MISC_FEATURE (10)..(14): Crosslink between residues
  MOD_RES (14)..(14): Alpha-Me S5-pentenyl-alanine olefin amino acid connected by an all-carbon crosslinker comprising one double bond
  C-term NH2
XIWIAQELRAIGDAFNAYYARR

SEQ ID NO: 94 - protein, 23 aa, Artificial Sequence
  Description of Artificial Sequence: Synthetic peptide
  N-term KLH
  MOD_RES (2)..(2): Beta-Ala
  MOD_RES (11)..(11): Alpha-Me S5-pentenyl-alanine olefin amino acid connected by an all-carbon crosslinker comprising one double bond
  MISC_FEATURE (11)..(15): Crosslink between residues
  MOD_RES (15)..(15): Alpha-Me S5-pentenyl-alanine olefin amino acid connected by an all-carbon crosslinker comprising one double bond
  C-term NH2
CAIWIAQELRAIGDAFNAYYARR

SEQ ID NO: 95 - protein, 23 aa, Artificial Sequence
  Description of Artificial Sequence: Synthetic peptide
  N-term OVA
  MOD_RES (2)..(2): Beta-Ala
  MOD_RES (11)..(11): Alpha-Me S5-pentenyl-alanine olefin amino acid connected by an all-carbon crosslinker comprising one double bond
  MISC_FEATURE (11)..(15): Crosslink between residues
  MOD_RES (15)..(15): Alpha-Me S5-pentenyl-alanine olefin amino acid connected by an all-carbon crosslinker comprising one double bond
  C-term NH2
CAIWIAQELRAIGDAFNAYYARR

SEQ ID NO: 96 - protein, 22 aa, Artificial Sequence
  Description of Artificial Sequence: Synthetic peptide
  N-term FITC
  MOD_RES (1)..(1): Beta-Ala
  MOD_RES (10)..(10): Alpha-Me S5-pentenyl-alanine olefin amino acid connected by an all-carbon crosslinker comprising one double bond
  MISC_FEATURE (10)..(14): Crosslink between residues
  MOD_RES (14)..(14): Alpha-Me S5-pentenyl-alanine olefin amino acid connected by an all-carbon crosslinker comprising one double bond
  C-term NH2
AIWIAQELRAIEDAFNAYYARR

SEQ ID NO: 97 - protein, 22 aa, Artificial Sequence
  Description of Artificial Sequence: Synthetic peptide
  N-term Biotin
  MOD_RES (1)..(1): 6-aminohexanoic acid
  MOD_RES (10)..(10): Alpha-Me S5-pentenyl-alanine olefin amino acid connected by an all-carbon crosslinker comprising one double bond
  MISC_FEATURE (10)..(14): Crosslink between residues
  MOD_RES (14)..(14): Alpha-Me S5-pentenyl-alanine olefin amino acid connected by an all-carbon crosslinker comprising one double bond
  C-term NH2
XIWIAQELRAIEDAFNAYYARR

SEQ ID NO: 98 - protein, 22 aa, Artificial Sequence
  Description of Artificial Sequence: Synthetic peptide
  N-term FITC
  MOD_RES (1)..(1): Beta-Ala
  MOD_RES (10)..(10): Alpha-Me S5-pentenyl-alanine olefin amino acid not connected by any crosslinker
  MOD_RES (14)..(14): Alpha-Me S5-pentenyl-alanine olefin amino acid not connected by any crosslinker
  C-term NH2
AIWIAQELRAIGDAFNAYYARR

SEQ ID NO: 99 - protein, 21 aa, Artificial Sequence
  Description of Artificial Sequence: Synthetic peptide
  N-term Ac
  MOD_RES (1)..(1): Beta-Ala
  MOD_RES (10)..(10): Alpha-Me S5-pentenyl-alanine olefin amino acid connected by an all-carbon crosslinker comprising one double bond
  MISC_FEATURE (10)..(14): Crosslink between residues
  MOD_RES (14)..(14): Alpha-Me S5-pentenyl-alanine olefin amino acid connected by an all-carbon crosslinker comprising one double bond
  C-term NH2
AIWIAQELRAIGDAFNAYYAR

SEQ ID NO: 100 - protein, 21 aa, Artificial Sequence
  Description of Artificial Sequence: Synthetic peptide
  N-term Ac
  MOD_RES (9)..(9): Modified alanine amino acid connected by a reduced olefin crosslinker
  MISC_FEATURE (9)..(13): Crosslink between residues
  MOD_RES (13)..(13): Modified alanine amino acid connected by a reduced olefin crosslinker
  C-term NH2
IWIAQELRAIGDAFNAYYARR

SEQ ID NO: 101 - protein, 23 aa, Artificial Sequence
  Description of Artificial Sequence: Synthetic peptide
  N-term H
  MOD_RES (2)..(2): Beta-Ala
  MOD_RES (11)..(11): Alpha-Me S5-pentenyl-alanine olefin amino acid connected by an all-carbon crosslinker comprising one double bond
  MISC_FEATURE (11)..(15): Crosslink between residues
  MOD_RES (15)..(15): Alpha-Me S5-pentenyl-alanine olefin amino acid connected by an all-carbon crosslinker comprising one double bond
  C-term NH2
CAIWIAQELRAIGDAFNAYYARR

SEQ ID NO: 102 - protein, 21 aa, Artificial Sequence
  Description of Artificial Sequence: Synthetic peptide
  N-term Ac
  MOD_RES (9)..(9): Alpha-Me S5-pentenyl-alanine olefin amino acid connected by an all-carbon crosslinker comprising one double bond
  MISC_FEATURE (9)..(13): Crosslink between residues
  MOD_RES (13)..(13): Alpha-Me S5-pentenyl-alanine olefin amino acid connected by an all-carbon crosslinker comprising one double bond
  C-term NH2
IWIAQALRAIGDAFAAYYARR

SEQ ID NO: 103 - protein, 21 aa, Artificial Sequence
  Description of Artificial Sequence: Synthetic peptide
  N-term Ac
  MOD_RES (9)..(9): Alpha-Me S5-pentenyl-alanine olefin amino acid connected by an all-carbon crosslinker comprising one double bond
  MISC_FEATURE (9)..(13): Crosslink between residues
  MOD_RES (11)..(11): 2-aminoisobutyric acid
  MOD_RES (13)..(13): Alpha-Me S5-pentenyl-alanine olefin amino acid connected by an all-carbon crosslinker comprising one double bond
  C-term NH2
IWIAQALRAIXDAFNAYYARR

SEQ ID NO: 104 - protein, 21 aa, Artificial Sequence
  Description of Artificial Sequence: Synthetic peptide
  N-term Ac
  MOD_RES (6)..(6): Alpha-Me S5-pentenyl-alanine olefin amino acid connected by an all-carbon crosslinker comprising one double bond
  MISC_FEATURE (6)..(10): Crosslink between residues
  MOD_RES (10)..(10): Alpha-Me S5-pentenyl-alanine olefin amino acid connected by an all-carbon crosslinker comprising one double bond
  C-term NH2
IWIAQALRRAGDEFNAYYARR

SEQ ID NO: 105 - protein, 21 aa, Artificial Sequence
  Description of Artificial Sequence: Synthetic peptide
  N-term Ac
  MOD_RES (6)..(6): Alpha-Me S5-pentenyl-alanine olefin amino acid connected by an all-carbon crosslinker comprising one double bond
  MISC_FEATURE (6)..(10): Crosslink between residues
  MOD_RES (10)..(10): Alpha-Me S5-pentenyl-alanine olefin amino acid connected by an all-carbon crosslinker comprising one double bond
  C-term NH2
IWIAQALRRAGDAFNAYYARR

SEQ ID NO: 106 - protein, 21 aa, Artificial Sequence
  Description of Artificial Sequence: Synthetic peptide
  N-term Ac
  MOD_RES (6)..(6): Alpha-Me S5-pentenyl-alanine olefin amino acid connected by an all-carbon crosslinker comprising one double bond
  MISC_FEATURE (6)..(10): Crosslink between residues
  MOD_RES (10)..(10): Alpha-Me S5-pentenyl-alanine olefin amino acid connected by an all-carbon crosslinker comprising one double bond
  C-term NH2
IWIAQALRAAGDAFNAYYARR

SEQ ID NO: 107 - protein, 21 aa, Artificial Sequence
  Description of Artificial Sequence: Synthetic peptide
  N-term Ac
  MOD_RES (4)..(4): Alpha-Me S5-pentenyl-alanine olefin amino acid connected by an all-carbon crosslinker comprising one double bond
  MISC_FEATURE (4)..(8): Crosslink between residues
  MOD_RES (8)..(8): Alpha-Me S5-pentenyl-alanine olefin amino acid connected by an all-carbon crosslinker comprising one double bond
  C-term NH2
IWIAQELARIGDEFNAYYARR

SEQ ID NO: 108 - protein, 21 aa, Artificial Sequence
  Description of Artificial Sequence: Synthetic peptide
  N-term Ac
  MOD_RES (4)..(4): Alpha-Me S5-pentenyl-alanine olefin amino acid connected by an all-carbon crosslinker comprising one double bond
  MISC_FEATURE (4)..(8): Crosslink between residues
  MOD_RES (8)..(8): Alpha-Me S5-pentenyl-alanine olefin amino acid connected by an all-carbon crosslinker comprising one double bond
  C-term NH2
IWIAQALARIGDEFNAYYARR

SEQ ID NO: 109 - protein, 21 aa, Artificial Sequence
  Description of Artificial Sequence: Synthetic peptide
  N-term Ac
  MOD_RES (4)..(4): Alpha-Me S5-pentenyl-alanine olefin amino acid connected by an all-carbon crosslinker comprising one double bond
  MISC_FEATURE (4)..(8): Crosslink between residues
  MOD_RES (8)..(8): Alpha-Me S5-pentenyl-alanine olefin amino acid connected by an all-carbon crosslinker comprising one double bond
  C-term NH2
IWIAQELARIGDAFNAYYARR

SEQ ID NO: 110 - protein, 21 aa, Artificial Sequence
  Description of Artificial Sequence: Synthetic peptide
  N-term Ac
  MOD_RES (4)..(4): Alpha-Me S5-pentenyl-alanine olefin amino acid connected by an all-carbon crosslinker comprising one double bond
  MISC_FEATURE (4)..(8): Crosslink between residues
  MOD_RES (8)..(8): Alpha-Me S5-pentenyl-alanine olefin amino acid connected by an all-carbon crosslinker comprising one double bond
  C-term NH2
IWIAQALARIGDAFNAYYARR

SEQ ID NO: 111 - protein, 21 aa, Artificial Sequence
  Description of Artificial Sequence: Synthetic peptide
  N-term Ac
  MOD_RES (9)..(9): Alpha-Me S5-pentenyl-alanine olefin amino acid connected by an all-carbon crosslinker comprising one double bond
  MISC_FEATURE (9)..(13): Crosslink between residues
  MOD_RES (13)..(13): Alpha-Me S5-pentenyl-alanine olefin amino acid connected by an all-carbon crosslinker comprising one double bond
  C-term NH2
IWIAQALRAIGDAANAYYARR

SEQ ID NO: 112 - protein, 21 aa, Artificial Sequence
  Description of Artificial Sequence: Synthetic peptide
  N-term Ac
  MOD_RES (9)..(9): Alpha-Me S5-pentenyl-alanine olefin amino acid connected by an all-carbon crosslinker comprising one double bond
  MISC_FEATURE (9)..(13): Crosslink between residues
  MOD_RES (13)..(13): Alpha-Me S5-pentenyl-alanine olefin amino acid connected by an all-carbon crosslinker comprising one double bond
  C-term NH2
RWIAQALRAIGDAFNAYYARR

SEQ ID NO: 113 - protein, 21 aa, Artificial Sequence
  Description of Artificial Sequence: Synthetic peptide
  N-term Ac
  MOD_RES (9)..(9): Alpha-Me S5-pentenyl-alanine olefin amino acid connected by an all-carbon crosslinker comprising one double bond
  MISC_FEATURE (9)..(13): Crosslink between residues
  MOD_RES (13)..(13): Alpha-Me S5-pentenyl-alanine olefin amino acid connected by an all-carbon crosslinker comprising one double bond
  C-term NH2
RNIAQELRAIGDAFNAYYARR

SEQ ID NO: 114 - protein, 21 aa, Artificial Sequence
  Description of Artificial Sequence: Synthetic peptide
  N-term Ac
  MOD_RES (9)..(9): Alpha-Me S5-pentenyl-alanine olefin amino acid connected by an all-carbon crosslinker comprising one double bond
  MISC_FEATURE (9)..(13): Crosslink between residues
  MOD_RES (13)..(13): Alpha-Me S5-pentenyl-alanine olefin amino acid connected by an all-carbon crosslinker comprising one double bond
  C-term NH2
RNIAQALRAIGDAFNAYYARR

SEQ ID NO: 115 - protein, 21 aa, Artificial Sequence
  Description of Artificial Sequence: Synthetic peptide
  N-term Ac
  MOD_RES (9)..(9): Alpha-Me S5-pentenyl-alanine olefin amino acid connected by an all-carbon crosslinker comprising one double bond
  MISC_FEATURE (9)..(13): Crosslink between residues
  MOD_RES (13)..(13): Alpha-Me S5-pentenyl-alanine olefin amino acid connected by an all-carbon crosslinker comprising one double bond
  C-term NH2
RRIAQALRAIGDAFNAYYARR

SEQ ID NO: 116 - protein, 21 aa, Artificial Sequence
  Description of Artificial Sequence: Synthetic peptide
  N-term Ac
  MOD_RES (9)..(9): Alpha-Me S5-pentenyl-alanine olefin amino acid connected by an all-carbon crosslinker comprising one double bond
  MISC_FEATURE (9)..(13): Crosslink between residues
  MOD_RES (13)..(13): Alpha-Me S5-pentenyl-alanine olefin amino acid connected by an all-carbon crosslinker comprising one double bond
  C-term NH2
RNIAQALRAIGDAANAYYARR

SEQ ID NO: 117 - protein, 21 aa, Artificial Sequence
  Description of Artificial Sequence: Synthetic peptide
  N-term Ac
  MOD_RES (9)..(9): Alpha-Me S5-pentenyl-alanine olefin amino acid connected by an all-carbon crosslinker comprising one double bond
  MISC_FEATURE (9)..(13): Crosslink between residues
  MOD_RES (13)..(13): Alpha-Me S5-pentenyl-alanine olefin amino acid connected by an all-carbon crosslinker comprising one double bond
  C-term NH2
RRIAQALRAIGDAANAYYARR

SEQ ID NO: 118 - protein, 21 aa, Artificial Sequence
  Description of Artificial Sequence: Synthetic peptide
  N-term H
  MOD_RES (9)..(9): Alpha-Me S5-pentenyl-alanine olefin amino acid connected by an all-carbon crosslinker comprising one double bond
  MISC_FEATURE (9)..(13): Crosslink between residues
  MOD_RES (13)..(13): Alpha-Me S5-pentenyl-alanine olefin amino acid connected by an all-carbon crosslinker comprising one double bond
  C-term NH2
IWIAQELRAIGDAFNAYYARR

SEQ ID NO: 119 - protein, 21 aa, Artificial Sequence
  Description of Artificial Sequence: Synthetic peptide
  N-term Ac
  MOD_RES (7)..(7): Cyclohexyl-Ala
  MOD_RES (9)..(9): Alpha-Me S5-pentenyl-alanine olefin amino acid connected by an all-carbon crosslinker comprising one double bond
  MISC_FEATURE (9)..(13): Crosslink between residues
  MOD_RES (13)..(13): Alpha-Me S5-pentenyl-alanine olefin amino acid connected by an all-carbon crosslinker comprising one double bond
  C-term NH2
IWIAQEARAIGDAFNAYYARR

SEQ ID NO: 120 - protein, 21 aa, Artificial Sequence
  Description of Artificial Sequence: Synthetic peptide
  N-term Ac
  MOD_RES (3)..(3): Cyclohexyl-Gly
  MOD_RES (9)..(9): Alpha-Me S5-pentenyl-alanine olefin amino acid connected by an all-carbon crosslinker comprising one double bond
  MISC_FEATURE (9)..(13): Crosslink between residues
  MOD_RES (13)..(13): Alpha-Me S5-pentenyl-alanine olefin amino acid connected by an all-carbon crosslinker comprising one double bond
  C-term NH2
IWGAQELRAIGDAFNAYYARR

SEQ ID NO: 121 - protein, 21 aa, Artificial Sequence
  Description of Artificial Sequence: Synthetic peptide
  N-term Ac
  MOD_RES (9)..(9): Alpha-Me S5-pentenyl-alanine olefin amino acid connected by an all-carbon crosslinker comprising one double bond
  MISC_FEATURE (9)..(13): Crosslink between residues
  MOD_RES (13)..(13): Alpha-Me S5-pentenyl-alanine olefin amino acid connected by an all-carbon crosslinker comprising one double bond
  C-term NH2
IRIAQALRAIGDAFNAYYARR

SEQ ID NO: 122 - protein, 21 aa, Artificial Sequence
  Description of Artificial Sequence: Synthetic peptide
  N-term Ac
  MOD_RES (6)..(6): 2-aminoisobutyric acid
  MOD_RES (9)..(9): Alpha-Me S5-pentenyl-alanine olefin amino acid connected by an all-carbon crosslinker comprising one double bond
  MISC_FEATURE (9)..(13): Crosslink between residues
  MOD_RES (13)..(13): Alpha-Me S5-pentenyl-alanine olefin amino acid connected by an all-carbon crosslinker comprising one double bond
  C-term NH2
IWIAQXLRAIGDAFNAYYARR

SEQ ID NO: 123 - protein, 21 aa, Artificial Sequence
  Description of Artificial Sequence: Synthetic peptide
  N-term Ac
  MOD_RES (4)..(4): 2-aminoisobutyric acid
  MOD_RES (9)..(9): Alpha-Me S5-pentenyl-alanine olefin amino acid connected by an all-carbon crosslinker comprising one double bond
  MISC_FEATURE (9)..(13): Crosslink between residues
  MOD_RES (13)..(13): Alpha-Me S5-pentenyl-alanine olefin amino acid connected by an all-carbon crosslinker comprising one double bond
  C-term NH2
IWIXQALRAIGDAFNAYYARR

SEQ ID NO: 124 - protein, 21 aa, Artificial Sequence
  Description of Artificial Sequence: Synthetic peptide
  N-term Ac
  MOD_RES (9)..(9): Alpha-Me S5-pentenyl-alanine olefin amino acid connected by an all-carbon crosslinker comprising one double bond
  MISC_FEATURE (9)..(13): Crosslink between residues
  MOD_RES (13)..(13): Alpha-Me S5-pentenyl-alanine olefin amino acid connected by an all-carbon crosslinker comprising one double bond
  MOD_RES (16)..(16): 2-aminoisobutyric acid
  C-term NH2
IWIAQALRAIGDAFNXYYARR

SEQ ID NO: 125 - protein, 21 aa, Artificial Sequence
  Description of Artificial Sequence: Synthetic peptide
  N-term Ac
  MOD_RES (9)..(9): Alpha-Me S5-pentenyl-alanine olefin amino acid connected by an all-carbon crosslinker comprising one double bond
  MISC_FEATURE (9)..(13): Crosslink between residues
  MOD_RES (13)..(13): Alpha-Me S5-pentenyl-alanine olefin amino acid connected by an all-carbon crosslinker comprising one double bond
  MOD_RES (19)..(19): 2-aminoisobutyric acid
  C-term NH2
IWIAQALRAIGDAFNAYYXRR

SEQ ID NO: 126 - protein, 21 aa, Artificial Sequence
  Description of Artificial Sequence: Synthetic peptide
  N-term Ac
  MOD_RES (9)..(9): Alpha-Me S5-pentenyl-alanine olefin amino acid connected by an all-carbon crosslinker comprising one double bond
  MISC_FEATURE (9)..(13): Crosslink between residues
  MOD_RES (13)..(13): Alpha-Me S5-pentenyl-alanine olefin amino acid connected by an all-carbon crosslinker comprising one double bond
  C-term NH2
IWIAQALRAIGDAFNASIARR

SEQ ID NO: 127 - protein, 21 aa, Artificial Sequence
  Description of Artificial Sequence: Synthetic peptide
  N-term Ac
  MOD_RES (9)..(9): Alpha-Me S5-pentenyl-alanine olefin amino acid connected by an all-carbon crosslinker comprising one double bond
  MISC_FEATURE (9)..(13): Crosslink between residues
  MOD_RES (13)..(13): Alpha-Me S5-pentenyl-alanine olefin amino acid connected by an all-carbon crosslinker comprising one double bond
  C-term NH2
IWIAQALRAIGDAFNAFYARR

SEQ ID NO: 128 - protein, 21 aa, Artificial Sequence
  Description of Artificial Sequence: Synthetic peptide
  N-term Ac
  MOD_RES (9)..(9): Alpha-Me S5-pentenyl-alanine olefin amino acid connected by an all-carbon crosslinker comprising one double bond
  MISC_FEATURE (9)..(13): Crosslink between residues
  MOD_RES (13)..(13): Alpha-Me S5-pentenyl-alanine olefin amino acid connected by an all-carbon crosslinker comprising one double bond
  C-term NH2
IWIAQALRAIGDAFNAFFARR

SEQ ID NO: 129 - protein, 19 aa, Artificial Sequence
  Description of Artificial Sequence: Synthetic peptide
  N-term Ac
  MOD_RES (9)..(9): Alpha-Me S5-pentenyl-alanine olefin amino acid connected by an all-carbon crosslinker comprising one double bond
  MISC_FEATURE (9)..(13): Crosslink between residues
  MOD_RES (13)..(13): Alpha-Me S5-pentenyl-alanine olefin amino acid connected by an all-carbon crosslinker comprising one double bond
  C-term NH2
IWIAQALRAIGDAFNARRA

SEQ ID NO: 130 - protein, 19 aa, Artificial Sequence
  Description of Artificial Sequence: Synthetic peptide
  N-term Ac
  MOD_RES (9)..(9): Alpha-Me S5-pentenyl-alanine olefin amino acid connected by an all-carbon crosslinker comprising one double bond
  MISC_FEATURE (9)..(13): Crosslink between residues
  MOD_RES (13)..(13): Alpha-Me S5-pentenyl-alanine olefin amino acid connected by an all-carbon crosslinker comprising one double bond
  C-term NH2
IWIAQALRAIGDAFNAYKA

SEQ ID NO: 131 - protein, 18 aa, Artificial Sequence
  Description of Artificial Sequence: Synthetic peptide
  N-term Ac
  MOD_RES (9)..(9): Alpha-Me S5-pentenyl-alanine olefin amino acid connected by an all-carbon crosslinker comprising one double bond
  MISC_FEATURE (9)..(13): Crosslink between residues
  MOD_RES (13)..(13): Alpha-Me S5-pentenyl-alanine olefin amino acid connected by an all-carbon crosslinker comprising one double bond
  C-term NH2
IWIAQALRAIGDAFNAYK

SEQ ID NO: 132 - protein, 21 aa, Artificial Sequence
  Description of Artificial Sequence: Synthetic peptide
  N-term Ac
  MOD_RES (9)..(9): Alpha-Me S5-pentenyl-alanine olefin amino acid connected by an all-carbon crosslinker comprising one double bond
  MISC_FEATURE (9)..(13): Crosslink between residues
  MOD_RES (13)..(13): Alpha-Me S5-pentenyl-alanine olefin amino acid connected by an all-carbon crosslinker comprising one double bond
  C-term NH2
IWIAQALRAIGDAFNASKARR

SEQ ID NO: 133 - protein, 21 aa, Artificial Sequence
  Description of Artificial Sequence: Synthetic peptide
  N-term Ac
  MOD_RES (9)..(9): Alpha-Me S5-pentenyl-alanine olefin amino acid connected by an all-carbon crosslinker comprising one double bond
  MISC_FEATURE (9)..(13): Crosslink between residues
  MOD_RES (13)..(13): Alpha-Me S5-pentenyl-alanine olefin amino acid connected by an all-carbon crosslinker comprising one double bond
  C-term NH2
RRIAQQLRAIGDAANAYYARR

SEQ ID NO: 134 - protein, 20 aa, Artificial Sequence
  Description of Artificial Sequence: Synthetic peptide
  N-term Ac
  MOD_RES (8)..(8): Alpha-Me S5-pentenyl-alanine olefin amino acid connected by an all-carbon crosslinker comprising one double bond
  MISC_FEATURE (8)..(12): Crosslink between residues
  MOD_RES (12)..(12): Alpha-Me S5-pentenyl-alanine olefin amino acid connected by an all-carbon crosslinker comprising one double bond
  C-term NH2
WIAQQLRAIGDAFNAYYARR

SEQ ID NO: 135 - protein, 20 aa, Artificial Sequence
  Description of Artificial Sequence: Synthetic peptide
  N-term Pr
  MOD_RES (8)..(8): Alpha-Me S5-pentenyl-alanine olefin amino acid connected by an all-carbon crosslinker comprising one double bond
  MISC_FEATURE (8)..(12): Crosslink between residues
  MOD_RES (12)..(12): Alpha-Me S5-pentenyl-alanine olefin amino acid connected by an all-carbon crosslinker comprising one double bond
  C-term NH2
WIAQQLRAIGDAFNAYYARR

SEQ ID NO: 136 - protein, 21 aa, Artificial Sequence
  Description of Artificial Sequence: Synthetic peptide
  N-term Ac
  MOD_RES (9)..(9): Alpha-Me S5-pentenyl-alanine olefin amino acid connected by an all-carbon crosslinker comprising one double bond
  MISC_FEATURE (9)..(13): Crosslink between residues
  MOD_RES (13)..(13): Alpha-Me S5-pentenyl-alanine olefin amino acid connected by an all-carbon crosslinker comprising one double bond
  C-term NH2
RWIAQQLRAIGNAFNAYYARR

SEQ ID NO: 137 - protein, 21 aa, Artificial Sequence
  Description of Artificial Sequence: Synthetic peptide
  N-term H
  MOD_RES (1)..(1): N-methylated arginine
  MOD_RES (9)..(9): Alpha-Me S5-pentenyl-alanine olefin amino acid connected by an all-carbon crosslinker comprising one double bond
  MISC_FEATURE (9)..(13): Crosslink between residues
  MOD_RES (13)..(13): Alpha-Me S5-pentenyl-alanine olefin amino acid connected by an all-carbon crosslinker comprising one double bond
  C-term NH2
RWIAQQLRAIGDAFNAYYARR

SEQ ID NO: 138 - protein, 21 aa, Artificial Sequence
  Description of Artificial Sequence: Synthetic peptide
  N-term Ac
  MOD_RES (1)..(1): N-methylated arginine
  MOD_RES (9)..(9): Alpha-Me S5-pentenyl-alanine olefin amino acid connected by an all-carbon crosslinker comprising one double bond
  MISC_FEATURE (9)..(13): Crosslink between residues
  MOD_RES (13)..(13): Alpha-Me S5-pentenyl-alanine olefin amino acid connected by an all-carbon crosslinker comprising one double bond
  C-term NH2
RWIAQQLRAIGDAFNAYYARR

SEQ ID NO: 139 - protein, 21 aa, Artificial Sequence
  Description of Artificial Sequence: Synthetic peptide
  N-term Ac
  MOD_RES (9)..(9): Alpha-Me S5-pentenyl-alanine olefin amino acid connected by an all-carbon crosslinker comprising one double bond
  MISC_FEATURE (9)..(13): Crosslink between residues
  MOD_RES (13)..(13): Alpha-Me S5-pentenyl-alanine olefin amino acid connected by an all-carbon crosslinker comprising one double bond
  C-term NH2
IWIAQHLRAIGDAFNAYYARR

SEQ ID NO: 140 - protein, 21 aa, Artificial Sequence
  Description of Artificial Sequence: Synthetic peptide
  N-term Ac
  MOD_RES (9)..(9): Alpha-Me S5-pentenyl-alanine olefin amino acid connected by an all-carbon crosslinker comprising one double bond
  MISC_FEATURE (9)..(13): Crosslink between residues
  MOD_RES (13)..(13): Alpha-Me S5-pentenyl-alanine olefin amino acid connected by an all-carbon crosslinker comprising one double bond
  C-term NH2
RWIAQHLRAIGDAFNAYYARR

SEQ ID NO: 141 - protein, 21 aa, Artificial Sequence
  Description of Artificial Sequence: Synthetic peptide
  N-term Ac
  MOD_RES (9)..(9): Alpha-Me S5-pentenyl-alanine olefin amino acid connected by an all-carbon crosslinker comprising one double bond
  MISC_FEATURE (9)..(13): Crosslink between residues
  MOD_RES (10)..(10): Cyclohexyl-Gly
  MOD_RES (13)..(13): Alpha-Me S5-pentenyl-alanine olefin amino acid connected by an all-carbon crosslinker comprising one double bond
  C-term NH2
RWIAQELRAGGDAFNAYYARR

SEQ ID NO: 142 - protein, 21 aa, Artificial Sequence
  Description of Artificial Sequence: Synthetic peptide
  N-term Ac
  MOD_RES (9)..(9): Alpha-Me S5-pentenyl-alanine olefin amino acid connected by an all-carbon crosslinker comprising one double bond
  MISC_FEATURE (9)..(13): Crosslink between residues
  MOD_RES (10)..(10): Cyclohexyl-Ala
  MOD_RES (13)..(13): Alpha-Me S5-pentenyl-alanine olefin amino acid connected by an all-carbon crosslinker comprising one double bond
  C-term NH2
RWIAQELRAAGDAFNAYYARR

SEQ ID NO: 143 - protein, 21 aa, Artificial Sequence
  Description of Artificial Sequence: Synthetic peptide
  N-term Ac
  MOD_RES (9)..(9): Alpha-Me S5-pentenyl-alanine olefin amino acid connected by an all-carbon crosslinker comprising one double bond
  MISC_FEATURE (9)..(13): Crosslink between residues
  MOD_RES (13)..(13): Alpha-Me S5-pentenyl-alanine olefin amino acid connected by an all-carbon crosslinker comprising one double bond
  C-term NH2
IWIAQQLRAIGDAFNAFFARR

SEQ ID NO: 144 - protein, 21 aa, Artificial Sequence
  Description of Artificial Sequence: Synthetic peptide
  N-term Ac
  MOD_RES (9)..(9): Alpha-Me S5-pentenyl-alanine olefin amino acid connected by an all-carbon crosslinker comprising one double bond
  MISC_FEATURE (9)..(13): Crosslink between residues
  MOD_RES (13)..(13): Alpha-Me S5-pentenyl-alanine olefin amino acid connected by an all-carbon crosslinker comprising one double bond
  C-term NH2
RWIAQQLRAIGDAFNAFYARR

SEQ ID NO: 145 - protein, 21 aa, Artificial Sequence
  Description of Artificial Sequence: Synthetic peptide
  N-term Ac
  MOD_RES (9)..(9): Alpha-Me S5-pentenyl-alanine olefin amino acid connected by an all-carbon crosslinker comprising one double bond
  MISC_FEATURE (9)..(13): Crosslink between residues
  MOD_RES (13)..(13): Alpha-Me S5-pentenyl-alanine olefin amino acid connected by an all-carbon crosslinker comprising one double bond
  C-term NH2
RWIAQQLRAIGDAFNAYFARR

SEQ ID NO: 146 - protein, 21 aa, Artificial Sequence
  Description of Artificial Sequence: Synthetic peptide
  N-term Ac
  MOD_RES (9)..(9): Alpha-Me S5-pentenyl-alanine olefin amino acid connected by an all-carbon crosslinker comprising one double bond
  MISC_FEATURE (9)..(13): Crosslink between residues
  MOD_RES (13)..(13): Alpha-Me S5-pentenyl-alanine olefin amino acid connected by an all-carbon crosslinker comprising one double bond
  C-term NH2
RWIAQQLRAIGDAFNATIARR

SEQ ID NO: 147 - protein, 20 aa, Artificial Sequence
  Description of Artificial Sequence: Synthetic peptide
  N-term Ac
  MOD_RES (9)..(9): Alpha-Me S5-pentenyl-alanine olefin amino acid connected by an all-carbon crosslinker comprising one double bond
  MISC_FEATURE (9)..(13): Crosslink between residues
  MOD_RES (13)..(13): Alpha-Me S5-pentenyl-alanine olefin amino acid connected by an all-carbon crosslinker comprising one double bond
  C-term NH2
RWIAQQLRAIGDAFNAYYAR

SEQ ID NO: 148 - protein, 19 aa, Artificial Sequence
  Description of Artificial Sequence: Synthetic peptide
  N-term Ac
  MOD_RES (9)..(9): Alpha-Me S5-pentenyl-alanine olefin amino acid connected by an all-carbon crosslinker comprising one double bond
  MISC_FEATURE (9)..(13): Crosslink between residues
  MOD_RES (13)..(13): Alpha-Me S5-pentenyl-alanine olefin amino acid connected by an all-carbon crosslinker comprising one double bond
  C-term NH2
RWIAQQLRAIGDAFNAYYA

SEQ ID NO: 149 - protein, 18 aa, Artificial Sequence
  Description of Artificial Sequence: Synthetic peptide
  N-term Ac
  MOD_RES (9)..(9): Alpha-Me S5-pentenyl-alanine olefin amino acid connected by an all-carbon crosslinker comprising one double bond
  MISC_FEATURE (9)..(13): Crosslink between residues
  MOD_RES (13)..(13): Alpha-Me S5-pentenyl-alanine olefin amino acid connected by an all-carbon crosslinker comprising one double bond
  C-term NH2
RWIAQQLRAIGDAFNAYY

SEQ ID NO: 150 - protein, 21 aa, Artificial Sequence
  Description of Artificial Sequence: Synthetic peptide
  N-term Ac
  MOD_RES (6)..(6): Alpha-Me S5-pentenyl-alanine olefin amino acid connected by an all-carbon crosslinker comprising one double bond
  MISC_FEATURE (6)..(10): Crosslink between residues
  MOD_RES (10)..(10): Alpha-Me S5-pentenyl-alanine olefin amino acid connected by an all-carbon crosslinker comprising one double bond
  C-term NH2
IWIAQALRRAGDQFNAYYARR

SEQ ID NO: 151 - protein, 21 aa, Artificial Sequence
  Description of Artificial Sequence: Synthetic peptide
  N-term Ac
  MOD_RES (6)..(6): Alpha-Me S5-pentenyl-alanine olefin amino acid connected by an all-carbon crosslinker comprising one double bond
  MISC_FEATURE (6)..(10): Crosslink between residues
  MOD_RES (10)..(10): Alpha-Me S5-pentenyl-alanine olefin amino acid connected by an all-carbon crosslinker comprising one double bond
  C-term NH2
IWIAQALRQAGDQFNAYYARR

SEQ ID NO: 152 - protein, 21 aa, Artificial Sequence
  Description of Artificial Sequence: Synthetic peptide
  N-term Ac
  MOD_RES (6)..(6): Alpha-Me S5-pentenyl-alanine olefin amino acid connected by an all-carbon crosslinker comprising one double bond
  MISC_FEATURE (6)..(10): Crosslink between residues
  MOD_RES (10)..(10): Alpha-Me S5-pentenyl-alanine olefin amino acid connected by an all-carbon crosslinker comprising one double bond
  C-term NH2
RWIAQALRAAGDQFNAYYARR

SEQ ID NO: 153 - protein, 23 aa, Artificial Sequence
  Description of Artificial Sequence: Synthetic peptide
  N-term H
  MOD_RES (2)..(2): Beta-Ala
  C-term NH2
CAIWIAQELRRIGDEFNAYYARR

SEQ ID NO: 154 - protein, 23 aa, Artificial Sequence
  Description of Artificial Sequence: Synthetic peptide
  N-term H
  MOD_RES (2)..(2): Beta-Ala
  C-term NH2
CAIWIAQELRRIGDEFNAYYARR

SEQ ID NO: 155 - protein, 23 aa, Artificial Sequence
  Description of Artificial Sequence: Synthetic peptide
  N-term H
  MOD_RES (2)..(2): Beta-Ala
  MOD_RES (11)..(11): Alpha-Me S5-pentenyl-alanine olefin amino acid connected by an all-carbon crosslinker comprising one double bond
  MISC_FEATURE (11)..(15): Crosslink between residues
  MOD_RES (15)..(15): Alpha-Me S5-pentenyl-alanine olefin amino acid connected by an all-carbon crosslinker comprising one double bond
  C-term NH2
CAIWIAQELRAIGDAFNAYYARR

SEQ ID NO: 156 - protein, 23 aa, Artificial Sequence
  Description of Artificial Sequence: Synthetic peptide
  N-term H
  MOD_RES (2)..(2): Beta-Ala
  MOD_RES (11)..(11): Alpha-Me S5-pentenyl-alanine olefin amino acid connected by an all-carbon crosslinker comprising one double bond
  MISC_FEATURE (11)..(15): Crosslink between residues
  MOD_RES (15)..(15): Alpha-Me S5-pentenyl-alanine olefin amino acid connected by an all-carbon crosslinker comprising one double bond
  C-term NH2
CAIWIAQELRAIGDAFNAYYARR

SEQ ID NO: 157 - protein, 20 aa, Artificial Sequence
  Description of Artificial Sequence: Synthetic peptide
  N-term Ac
  MOD_RES (9)..(9): Alpha-Me S5-pentenyl-alanine olefin amino acid connected by an all-carbon crosslinker comprising one double bond
  MISC_FEATURE (9)..(13): Crosslink between residues
  MOD_RES (13)..(13): Alpha-Me S5-pentenyl-alanine olefin amino acid connected by an all-carbon crosslinker comprising one double bond
  C-term NH2
RRIAQQLRAIGDAFNAYYAR

SEQ ID NO: 158 - protein, 20 aa, Artificial Sequence
  Description of Artificial Sequence: Synthetic peptide
  N-term Ac
  MOD_RES (9)..(9): Alpha-Me S5-pentenyl-alanine olefin amino acid connected by an all-carbon crosslinker comprising one double bond
  MISC_FEATURE (9)..(13): Crosslink between residues
  MOD_RES (13)..(13): Alpha-Me S5-pentenyl-alanine olefin amino acid connected by an all-carbon crosslinker comprising one double bond
  C-term NH2
RRIAQALRAIGDAFNAYYAR

SEQ ID NO: 159 - protein, 19 aa, Artificial Sequence
  Description of Artificial Sequence: Synthetic peptide
  N-term Ac
  MOD_RES (9)..(9): Alpha-Me S5-pentenyl-alanine olefin amino acid connected by an all-carbon crosslinker comprising one double bond
  MISC_FEATURE (9)..(13): Crosslink between residues
  MOD_RES (13)..(13): Alpha-Me S5-pentenyl-alanine olefin amino acid connected by an all-carbon crosslinker comprising one double bond
  C-term NH2
RRIAQQLRAIGDAFNAYYA

SEQ ID NO: 160 - protein, 19 aa, Artificial Sequence
  Description of Artificial Sequence: Synthetic peptide
  N-term Ac
  MOD_RES (9)..(9): Alpha-Me S5-pentenyl-alanine olefin amino acid connected by an all-carbon crosslinker comprising one double bond
  MISC_FEATURE (9)..(13): Crosslink between residues
  MOD_RES (13)..(13): Alpha-Me S5-pentenyl-alanine olefin amino acid connected by an all-carbon crosslinker comprising one double bond
  C-term NH2
IWIAQQLRAIGDAFNARRA

SEQ ID NO: 161 - protein, 19 aa, Artificial Sequence
  Description of Artificial Sequence: Synthetic peptide
  N-term Ac
  MOD_RES (9)..(9): Alpha-Me S5-pentenyl-alanine olefin amino acid connected by an all-carbon crosslinker comprising one double bond
  MISC_FEATURE (9)..(13): Crosslink between residues
  MOD_RES (13)..(13): Alpha-Me S5-pentenyl-alanine olefin amino acid connected by an all-carbon crosslinker comprising one double bond
  C-term NH2
RWIAQQLRAIGDAFNARRA

SEQ ID NO: 162 - protein, 19 aa, Artificial Sequence
  Description of Artificial Sequence: Synthetic peptide
  N-term Ac
  MOD_RES (9)..(9): Alpha-Me S5-pentenyl-alanine olefin amino acid connected by an all-carbon crosslinker comprising one double bond
  MISC_FEATURE (9)..(13): Crosslink between residues
  MOD_RES (13)..(13): Alpha-Me S5-pentenyl-alanine olefin amino acid connected by an all-carbon crosslinker comprising one double bond
  C-term NH2
RRIAQQLRAIGDAFNARRA

SEQ ID NO: 163 - protein, 19 aa, Artificial Sequence
  Description of Artificial Sequence: Synthetic peptide
  N-term Ac
  MOD_RES (9)..(9): Alpha-Me S5-pentenyl-alanine olefin amino acid connected by an all-carbon crosslinker comprising one double bond
  MISC_FEATURE (9)..(13): Crosslink between residues
  MOD_RES (13)..(13): Alpha-Me S5-pentenyl-alanine olefin amino acid connected by an all-carbon crosslinker comprising one double bond
  C-term NH2
RRIAQQLRAIGDAFNARRA

SEQ ID NO: 164 - protein, 19 aa, Artificial Sequence
  Description of Artificial Sequence: Synthetic peptide
  N-term Ac
  MOD_RES (9)..(9): Alpha-Me S5-pentenyl-alanine olefin amino acid connected by an all-carbon crosslinker comprising one double bond
  MISC_FEATURE (9)..(13): Crosslink between residues
  MOD_RES (13)..(13): Alpha-Me S5-pentenyl-alanine olefin amino acid connected by an all-carbon crosslinker comprising one double bond
  C-term NH2
RWIAQQLRAIGDAFNARYA

SEQ ID NO: 165 - protein, 19 aa, Artificial Sequence
  Description of Artificial Sequence: Synthetic peptide
  N-term Ac
  MOD_RES (9)..(9): Alpha-Me S5-pentenyl-alanine olefin amino acid connected by an all-carbon crosslinker comprising one double bond
  MISC_FEATURE (9)..(13): Crosslink between residues
  MOD_RES (13)..(13): Alpha-Me S5-pentenyl-alanine olefin amino acid connected by an all-carbon crosslinker comprising one double bond
  C-term NH2
RWIAQQLRAIGDAFNAYRA

SEQ ID NO: 166 - protein, 19 aa, Artificial Sequence
  Description of Artificial Sequence: Synthetic peptide
  N-term Ac
  MOD_RES (9)..(9): Alpha-Me S5-pentenyl-alanine olefin amino acid connected by an all-carbon crosslinker comprising one double bond
  MISC_FEATURE (9)..(13): Crosslink between residues
  MOD_RES (13)..(13): Alpha-Me S5-pentenyl-alanine olefin amino acid connected by an all-carbon crosslinker comprising one double bond
  C-term NH2
RWIAQQLRAIGDAFNARYA

SEQ ID NO: 167 - protein, 19 aa, Artificial Sequence
  Description of Artificial Sequence: Synthetic peptide
  N-term Ac
  MOD_RES (9)..(9): Alpha-Me S5-pentenyl-alanine olefin amino acid connected by an all-carbon crosslinker comprising one double bond
  MISC_FEATURE (9)..(13): Crosslink between residues
  MOD_RES (13)..(13): Alpha-Me S5-pentenyl-alanine olefin amino acid connected by an all-carbon crosslinker comprising one double bond
  C-term NH2
RWIAQQLRAIGDAFNAYRA

SEQ ID NO: 168 - protein, 19 aa, Artificial Sequence
  Description of Artificial Sequence: Synthetic peptide
  N-term Ac
  MOD_RES (9)..(9): Alpha-Me S5-pentenyl-alanine olefin amino acid connected by an all-carbon crosslinker comprising one double bond
  MISC_FEATURE (9)..(13): Crosslink between residues
  MOD_RES (13)..(13): Alpha-Me S5-pentenyl-alanine olefin amino acid connected by an all-carbon crosslinker comprising one double bond
  C-term NH2
RRIAQQLRAIGDAFNASIA

SEQ ID NO: 169 - protein, 19 aa, Artificial Sequence
  Description of Artificial Sequence: Synthetic peptide
  N-term Ac
  MOD_RES (9)..(9): Alpha-Me S5-pentenyl-alanine olefin amino acid connected by an all-carbon crosslinker comprising one double bond
  MISC_FEATURE (9)..(13): Crosslink between residues
  MOD_RES (13)..(13): Alpha-Me S5-pentenyl-alanine olefin amino acid connected by an all-carbon crosslinker comprising one double bond
  C-term NH2
RRIAQALRAIGDAFNASIA

SEQ ID NO: 170 - protein, 18 aa, Artificial Sequence
  Description of Artificial Sequence: Synthetic peptide
  N-term Ac
  MOD_RES (9)..(9): Alpha-Me S5-pentenyl-alanine olefin amino acid connected by an all-carbon crosslinker comprising one double bond
  MISC_FEATURE (9)..(13): Crosslink between residues
  MOD_RES (13)..(13): Alpha-Me S5-pentenyl-alanine olefin amino acid connected by an all-carbon crosslinker comprising one double bond
  C-term NH2
RRIAQALRAIGDAFNASI

SEQ ID NO: 171 - protein, 18 aa, Artificial Sequence
  Description of Artificial Sequence: Synthetic peptide
  N-term Ac
  MOD_RES (9)..(9): Alpha-Me S5-pentenyl-alanine olefin amino acid connected by an all-carbon crosslinker comprising one double bond
  MISC_FEATURE (9)..(13): Crosslink between residues
  MOD_RES (13)..(13): Alpha-Me S5-pentenyl-alanine olefin amino acid connected by an all-carbon crosslinker comprising one double bond
  C-term NH2
RWIAQQLRAIGDAFNARR

SEQ ID NO: 172 - protein, 17 aa, Artificial Sequence
  Description of Artificial Sequence: Synthetic peptide
  N-term Ac
  MOD_RES (9)..(9): Alpha-Me S5-pentenyl-alanine olefin amino acid connected by an all-carbon crosslinker comprising one double bond
  MISC_FEATURE (9)..(13): Crosslink between residues
  MOD_RES (13)..(13): Alpha-Me S5-pentenyl-alanine olefin amino acid connected by an all-carbon crosslinker comprising one double bond
  C-term NH2
RWIAQQLRAIGDAFNAR

SEQ ID NO: 173 - protein, 17 aa, Artificial Sequence
  Description of Artificial Sequence: Synthetic peptide
  N-term Ac
  MOD_RES (9)..(9): Alpha-Me S5-pentenyl-alanine olefin amino acid connected by an all-carbon crosslinker comprising one double bond
  MISC_FEATURE (9)..(13): Crosslink between residues
  MOD_RES (13)..(13): Alpha-Me S5-pentenyl-alanine olefin amino acid connected by an all-carbon crosslinker comprising one double bond
  C-term NH2
RRIAQQLRAIGDAFNAR

SEQ ID NO: 174 - protein, 16 aa, Artificial Sequence
  Description of Artificial Sequence: Synthetic peptide
  N-term Ac
  MOD_RES (9)..(9): Alpha-Me S5-pentenyl-alanine olefin amino acid connected by an all-carbon crosslinker comprising one double bond
  MISC_FEATURE (9)..(13): Crosslink between residues
  MOD_RES (13)..(13): Alpha-Me S5-pentenyl-alanine olefin amino acid connected by an all-carbon crosslinker comprising one double bond
  MOD_RES (16)..(16): 2-aminoisobutyric acid
  C-term NH2
RRIAQQLRAIGDAFNX

SEQ ID NO: 175 - protein, 16 aa, Artificial Sequence
  Description of Artificial Sequence: Synthetic peptide
  N-term Ac
  MOD_RES (9)..(9): Alpha-Me S5-pentenyl-alanine olefin amino acid connected by an all-carbon crosslinker comprising one double bond
  MISC_FEATURE (9)..(13): Crosslink between residues
  MOD_RES (13)..(13): Alpha-Me S5-pentenyl-alanine olefin amino acid connected by an all-carbon crosslinker comprising one double bond
  C-term NH2
RRIAQQLRAIGDAFNA

SEQ ID NO: 176 - protein, 19 aa, Artificial Sequence
  Description of Artificial Sequence: Synthetic peptide
  N-term Ac
  MOD_RES (9)..(9): Alpha-Me S5-pentenyl-alanine olefin amino acid connected by an all-carbon crosslinker comprising one double bond
  MISC_FEATURE (9)..(13): Crosslink between residues
  MOD_RES (13)..(13): Alpha-Me S5-pentenyl-alanine olefin amino acid connected by an all-carbon crosslinker comprising one double bond
  C-term NH2
RRIAQQLRAIGDAFNARRA

SEQ ID NO: 177 - protein, 19 aa, Artificial Sequence
  Description of Artificial Sequence: Synthetic peptide
  N-term Ac
  MOD_RES (9)..(9): Alpha-Me S5-pentenyl-alanine olefin amino acid connected by an all-carbon crosslinker comprising one double bond
  MISC_FEATURE (9)..(13): Crosslink between residues
  MOD_RES (13)..(13): Alpha-Me S5-pentenyl-alanine olefin amino acid connected by an all-carbon crosslinker comprising one double bond
  C-term NH2
RRIAQQLRAIGDAFNAYYA

SEQ ID NO: 178 - protein, 19 aa, Artificial Sequence
  Description of Artificial Sequence: Synthetic peptide
  N-term Ac
  MOD_RES (9)..(9): Alpha-Me S5-pentenyl-alanine olefin amino acid connected by an all-carbon crosslinker comprising one double bond
  MISC_FEATURE (9)..(13): Crosslink between residues
  MOD_RES (13)..(13): Alpha-Me S5-pentenyl-alanine olefin amino acid connected by an all-carbon crosslinker comprising one double bond
  MOD_RES (19)..(19): 2-aminoisobutyric acid
  C-term NH2
RRIAQQLRAIGDAFNAYYX

SEQ ID NO: 179 - protein, 19 aa, Artificial Sequence
  Description of Artificial Sequence: Synthetic peptide
  N-term Ac
  MOD_RES (9)..(9): Alpha-Me S5-pentenyl-alanine olefin amino acid connected by an all-carbon crosslinker comprising one double bond
  MISC_FEATURE (9)..(13): Crosslink between residues
  MOD_RES (13)..(13): Alpha-Me S5-pentenyl-alanine olefin amino acid connected by an all-carbon crosslinker comprising one double bond
  MOD_RES (16)..(16): 2-aminoisobutyric acid
  C-term NH2
RWIAQQLRAIGDAFNXRRA

SEQ ID NO: 180 - protein, 19 aa, Artificial Sequence
  Description of Artificial Sequence: Synthetic peptide
  N-term Ac
  MOD_RES (4)..(4): 2-aminoisobutyric acid
  MOD_RES (9)..(9): Alpha-Me S5-pentenyl-alanine olefin amino acid connected by an all-carbon crosslinker comprising one double bond
  MISC_FEATURE (9)..(13): Crosslink between residues
  MOD_RES (13)..(13): Alpha-Me S5-pentenyl-alanine olefin amino acid connected by an all-carbon crosslinker comprising one double bond
  C-term NH2
RWIXQQLRAIGDAFNARRA

SEQ ID NO: 181 - protein, 19 aa, Artificial Sequence
  Description of Artificial Sequence: Synthetic peptide
  N-term Ac
  MOD_RES (3)..(3): 2-aminoisobutyric acid
  MOD_RES (9)..(9): Alpha-Me S5-pentenyl-alanine olefin amino acid connected by an all-carbon crosslinker comprising one double bond
  MISC_FEATURE (9)..(13): Crosslink between residues
  MOD_RES (13)..(13): Alpha-Me S5-pentenyl-alanine olefin amino acid connected by an all-carbon crosslinker comprising one double bond
  C-term NH2
RWXAQQLRAIGDAFNARRA

SEQ ID NO: 182 - protein, 19 aa, Artificial Sequence
  Description of Artificial Sequence: Synthetic peptide
  N-term Ac
  MOD_RES (2)..(2): 2-aminoisobutyric acid
  MOD_RES (9)..(9): Alpha-Me S5-pentenyl-alanine olefin amino acid connected by an all-carbon crosslinker comprising one double bond
  MISC_FEATURE (9)..(13): Crosslink between residues
  MOD_RES (13)..(13): Alpha-Me S5-pentenyl-alanine olefin amino acid connected by an all-carbon crosslinker comprising one double bond
  C-term NH2
RXIAQQLRAIGDAFNARRA

SEQ ID NO: 183 - protein, 21 aa, Artificial Sequence
  Description of Artificial Sequence: Synthetic peptide
  N-term Ac
  MOD_RES (9)..(9): Alpha-Me S5-pentenyl-alanine olefin amino acid connected by an all-carbon crosslinker comprising one double bond
  MISC_FEATURE (9)..(13): Crosslink between residues
  MOD_RES (13)..(13): Alpha-Me S5-pentenyl-alanine olefin amino acid connected by an all-carbon crosslinker comprising one double bond
  C-term NH2
RFIAQQLRAIGDAFNAYYARR

SEQ ID NO: 184 - protein, 19 aa, Artificial Sequence
  Description of Artificial Sequence: Synthetic peptide
  N-term Ac
  MOD_RES (9)..(9): Alpha-Me S5-pentenyl-alanine olefin amino acid connected by an all-carbon crosslinker comprising one double bond
  MISC_FEATURE (9)..(13): Crosslink between residues
  MOD_RES (13)..(13): Alpha-Me S5-pentenyl-alanine olefin amino acid connected by an all-carbon crosslinker comprising one double bond
  C-term NH2
RFIAQQLRAIGDAFNARRA

SEQ ID NO: 185 - protein, 21 aa, Artificial Sequence
  Description of Artificial Sequence: Synthetic peptide
  N-term Ac
  MOD_RES (2)..(2): 2-aminoisobutyric acid
  MOD_RES (9)..(9): Alpha-Me S5-pentenyl-alanine olefin amino acid connected by an all-carbon crosslinker comprising one double bond
  MISC_FEATURE (9)..(13): Crosslink between residues
  MOD_RES (13)..(13): Alpha-Me S5-pentenyl-alanine olefin amino acid connected by an all-carbon crosslinker comprising one double bond
  C-term NH2
RXIAQQLRAIGDAFNAYYARR

SEQ ID NO: 186 - protein, 21 aa, Artificial Sequence
  Description of Artificial Sequence: Synthetic peptide
  N-term Ac
  MOD_RES (7)..(7): homo-Phe
  MOD_RES (9)..(9): Alpha-Me S5-pentenyl-alanine olefin amino acid connected by an all-carbon crosslinker comprising one double bond
  MISC_FEATURE (9)..(13): Crosslink between residues
  MOD_RES (13)..(13): Alpha-Me S5-pentenyl-alanine olefin amino acid connected by an all-carbon crosslinker comprising one double bond
  C-term NH2
RWIAQQFRAIGDAFNAYYARR

SEQ ID NO: 187 - protein, 21 aa, Artificial Sequence
  Description of Artificial Sequence: Synthetic peptide
  N-term Ac
  MOD_RES (7)..(7): 3-chloro phenylalanine
  MOD_RES (9)..(9): Alpha-Me S5-pentenyl-alanine olefin amino acid connected by an all-carbon crosslinker comprising one double bond
  MISC_FEATURE (9)..(13): Crosslink between residues
  MOD_RES (13)..(13): Alpha-Me S5-pentenyl-alanine olefin amino acid connected by an all-carbon crosslinker comprising one double bond
  C-term NH2
RWIAQQFRAIGDAFNAYYARR

SEQ ID NO: 188 - protein, 21 aa, Artificial Sequence
  Description of Artificial Sequence: Synthetic peptide
  N-term Ac
  MOD_RES (7)..(7): 1-Naphthalanine
  MOD_RES (9)..(9): Alpha-Me S5-pentenyl-alanine olefin amino acid connected by an all-carbon crosslinker comprising one double bond
  MISC_FEATURE (9)..(13): Crosslink between residues
  MOD_RES (13)..(13): Alpha-Me S5-pentenyl-alanine olefin amino acid connected by an all-carbon crosslinker comprising one double bond
  C-term NH2
RWIAQQARAIGDAFNAYYARR

SEQ ID NO: 189 - protein, 21 aa, Artificial Sequence
  Description of Artificial Sequence: Synthetic peptide
  N-term Ac
  MOD_RES (7)..(7): 2-Naphthalanine
  MOD_RES (9)..(9): Alpha-Me S5-pentenyl-alanine olefin amino acid connected by an all-carbon crosslinker comprising one double bond
  MISC_FEATURE (9)..(13): Crosslink between residues
  MOD_RES (13)..(13): Alpha-Me S5-pentenyl-alanine olefin amino acid connected by an all-carbon crosslinker comprising one double bond
  C-term NH2
RWIAQQARAIGDAFNAYYARR

SEQ ID NO: 190 - protein, 21 aa, Artificial Sequence
  Description of Artificial Sequence: Synthetic peptide
  N-term Ac
  MOD_RES (9)..(9): Alpha-Me S5-pentenyl-alanine olefin amino acid connected by an all-carbon crosslinker comprising one double bond
  MISC_FEATURE (9)..(13): Crosslink between residues
  MOD_RES (13)..(13): Alpha-Me S5-pentenyl-alanine olefin amino acid connected by an all-carbon crosslinker comprising one double bond
  C-term NH2
IWIAQEARAIGDAANAYYARR

SEQ ID NO: 191 - protein, 19 aa, Artificial Sequence
  Description of Artificial Sequence: Synthetic peptide
  N-term Ac
  MOD_RES (4)..(4): Alpha-Me S5-pentenyl-alanine olefin amino acid connected by an all-carbon crosslinker comprising one double bond
  MISC_FEATURE (4)..(8): Crosslink between residues
  MOD_RES (8)..(8): Alpha-Me S5-pentenyl-alanine olefin amino acid connected by an all-carbon crosslinker comprising one double bond
  MOD_RES (13)..(13): 2-aminoisobutyric acid
  C-term NH2
RRIAQALARIGDXFNARRA

SEQ ID NO: 192 - protein, 19 aa, Artificial Sequence
  Description of Artificial Sequence: Synthetic peptide
  N-term Ac
  MOD_RES (6)..(6): Alpha-Me S5-pentenyl-alanine olefin amino acid connected by an all-carbon crosslinker comprising one double bond
  MISC_FEATURE (6)..(10): Crosslink between residues
  MOD_RES (10)..(10): Alpha-Me S5-pentenyl-alanine olefin amino acid connected by an all-carbon crosslinker comprising one double bond
  MOD_RES (13)..(13): 2-aminoisobutyric acid
  C-term NH2
RRIAQALRRAGDXFNARRA

SEQ ID NO: 193 - protein, 21 aa, Artificial Sequence
  Description of Artificial Sequence: Synthetic peptide
  N-term iBu
  MOD_RES (9)..(9): Alpha-Me S5-pentenyl-alanine olefin amino acid connected by an all-carbon crosslinker comprising one double bond
  MISC_FEATURE (9)..(13): Crosslink between residues
  MOD_RES (13)..(13): Alpha-Me S5-pentenyl-alanine olefin amino acid connected by an all-carbon crosslinker comprising one double bond
  C-term NH2
RWIAQQLRAIGDAFNAYYARR

SEQ ID NO: 194 - protein, 21 aa, Artificial Sequence
  Description of Artificial Sequence: Synthetic peptide
  N-term Dec
  MOD_RES (9)..(9): Alpha-Me S5-pentenyl-alanine olefin amino acid connected by an all-carbon crosslinker comprising one double bond
  MISC_FEATURE (9)..(13): Crosslink between residues
  MOD_RES (13)..(13): Alpha-Me S5-pentenyl-alanine olefin amino acid connected by an all-carbon crosslinker comprising one double bond
  C-term NH2
RWIAQQLRAIGDAFNAYYARR

SEQ ID NO: 195 - protein, 21 aa, Artificial Sequence
  Description of Artificial Sequence: Synthetic peptide
  N-term Bz
  MOD_RES (9)..(9): Alpha-Me S5-pentenyl-alanine olefin amino acid connected by an all-carbon crosslinker comprising one double bond
  MISC_FEATURE (9)..(13): Crosslink between residues
  MOD_RES (13)..(13): Alpha-Me S5-pentenyl-alanine olefin amino acid connected by an all-carbon crosslinker comprising one double bond
  C-term NH2
RWIAQQLRAIGDAFNAYYARR

SEQ ID NO: 196 - protein, 21 aa, Artificial Sequence
  Description of Artificial Sequence: Synthetic peptide
  N-term H
  MOD_RES (9)..(9): Alpha-Me S5-pentenyl-alanine olefin amino acid connected by an all-carbon crosslinker comprising one double bond
  MISC_FEATURE (9)..(13): Crosslink between residues
  MOD_RES (13)..(13): Alpha-Me S5-pentenyl-alanine olefin amino acid connected by an all-carbon crosslinker comprising one double bond
  C-term NH2
RWIAQQLRAIGDAFNAYYARR

SEQ ID NO: 197 - protein, 21 aa, Artificial Sequence
  Description of Artificial Sequence: Synthetic peptide
  N-term Chx
  MOD_RES (9)..(9): Alpha-Me S5-pentenyl-alanine olefin amino acid connected by an all-carbon crosslinker comprising one double bond
  MISC_FEATURE (9)..(13): Crosslink between residues
  MOD_RES (13)..(13): Alpha-Me S5-pentenyl-alanine olefin amino acid connected by an all-carbon crosslinker comprising one double bond
  C-term NH2
RWIAQQLRAIGDAFNAYYARR

SEQ ID NO: 198 - protein, 21 aa, Artificial Sequence
  Description of Artificial Sequence: Synthetic peptide
  N-term Vrl
  MOD_RES (9)..(9): Alpha-Me S5-pentenyl-alanine olefin amino acid connected by an all-carbon crosslinker comprising one double bond
  MISC_FEATURE (9)..(13): Crosslink between residues
  MOD_RES (13)..(13): Alpha-Me S5-pentenyl-alanine olefin amino acid connected by an all-carbon crosslinker comprising one double bond
  C-term NH2
RWIAQQLRAIGDAFNAYYARR

SEQ ID NO: 199 - protein, 21 aa, Artificial Sequence
  Description of Artificial Sequence: Synthetic peptide
  N-term PhAc
  MOD_RES (9)..(9): Alpha-Me S5-pentenyl-alanine olefin amino acid connected by an all-carbon crosslinker comprising one double bond
  MISC_FEATURE (9)..(13): Crosslink between residues
  MOD_RES (13)..(13): Alpha-Me S5-pentenyl-alanine olefin amino acid connected by an all-carbon crosslinker comprising one double bond
  C-term NH2
RWIAQQLRAIGDAFNAYYARR

SEQ ID NO: 200 - protein, 21 aa, Artificial Sequence
  Description of Artificial Sequence: Synthetic peptide
  N-term MeImC
  MOD_RES (9)..(9): Alpha-Me S5-pentenyl-alanine olefin amino acid connected by an all-carbon crosslinker comprising one double bond
  MISC_FEATURE (9)..(13): Crosslink between residues
  MOD_RES (13)..(13): Alpha-Me S5-pentenyl-alanine olefin amino acid connected by an all-carbon crosslinker comprising one double bond
  C-term NH2
RWIAQQLRAIGDAFNAYYARR

SEQ ID NO: 201 - protein, 21 aa, Artificial Sequence
  Description of Artificial Sequence: Synthetic peptide
  N-term Pr
  MOD_RES (9)..(9): Alpha-Me S5-pentenyl-alanine olefin amino acid connected by an all-carbon crosslinker comprising one double bond
  MISC_FEATURE (9)..(13): Crosslink between residues
  MOD_RES (13)..(13): Alpha-Me S5-pentenyl-alanine olefin amino acid connected by an all-carbon crosslinker comprising one double bond
  C-term NH2
RWIAQQLRAIGDAFNAYYARR

SEQ ID NO: 202 - protein, 21 aa, Artificial Sequence
  Description of Artificial Sequence: Synthetic peptide
  N-term Ac
  MOD_RES (9)..(9): Alpha-Me S5-pentenyl-alanine olefin amino acid connected by an all-carbon crosslinker comprising one double bond
  MISC_FEATURE (9)..(13): Crosslink between residues
  MOD_RES (13)..(13): Alpha-Me S5-pentenyl-alanine olefin amino acid connected by an all-carbon crosslinker comprising one double bond
  C-term NH2
RWIAQALRAIGDAFNASIARR

SEQ ID NO: 203 - protein, 21 aa, Artificial Sequence
  Description of Artificial Sequence: Synthetic peptide
  N-term Ac
  MOD_RES (9)..(9): Alpha-Me S5-pentenyl-alanine olefin amino acid connected by an all-carbon crosslinker comprising one double bond
  MISC_FEATURE (9)..(13): Crosslink between residues
  MOD_RES (13)..(13): Alpha-Me S5-pentenyl-alanine olefin amino acid connected by an all-carbon crosslinker comprising one double bond
  C-term NH2
RWIAQQLRAIGDAFNASIARR

SEQ ID NO: 204 - protein, 21 aa, Artificial Sequence
  Description of Artificial Sequence: Synthetic peptide
  N-term Ac
  MOD_RES (9)..(9): Alpha-Me S5-pentenyl-alanine olefin amino acid connected by an all-carbon crosslinker comprising one double bond
  MISC_FEATURE (9)..(13): Crosslink between residues
  MOD_RES (13)..(13): Alpha-Me S5-pentenyl-alanine olefin amino acid connected by an all-carbon crosslinker comprising one double bond
  C-term NH2
RWIAQALRAIGDAFNAFYARR

SEQ ID NO: 205 - protein, 19 aa, Artificial Sequence
  Description of Artificial Sequence: Synthetic peptide
  N-term Ac
  MOD_RES (9)..(9): Alpha-Me S5-pentenyl-alanine olefin amino acid connected by an all-carbon crosslinker comprising one double bond
  MISC_FEATURE (9)..(13): Crosslink between residues
  MOD_RES (13)..(13): Alpha-Me S5-pentenyl-alanine olefin amino acid connected by an all-carbon crosslinker comprising one double bond
  C-term NH2
RRIAQALRAIGDAFNAFYA

SEQ ID NO: 206 - protein, 19 aa, Artificial Sequence
  Description of Artificial Sequence: Synthetic peptide
  N-term Ac
  MOD_RES (9)..(9): Alpha-Me S5-pentenyl-alanine olefin amino acid connected by an all-carbon crosslinker comprising one double bond
  MISC_FEATURE (9)..(13): Crosslink between residues
  MOD_RES (13)..(13): Alpha-Me S5-pentenyl-alanine olefin amino acid connected by an all-carbon crosslinker comprising one double bond
  C-term NH2
RRIAQQLRAIGDAFNAFYA

SEQ ID NO: 207 - protein, 21 aa, Artificial Sequence
  Description of Artificial Sequence: Synthetic peptide
  N-term Ac
  MOD_RES (9)..(9): Alpha-Me S5-pentenyl-alanine olefin amino acid connected by an all-carbon crosslinker comprising one double bond
  MISC_FEATURE (9)..(13): Crosslink between residues
  MOD_RES (13)..(13): Alpha-Me S5-pentenyl-alanine olefin amino acid connected by an all-carbon crosslinker comprising one double bond
  C-term NHPr
RWIAQALRAIGDAFNAYYARR

SEQ ID NO: 208 - protein, 21 aa, Artificial Sequence
  Description of Artificial Sequence: Synthetic peptide
  N-term Ac
  MOD_RES (9)..(9): Alpha-Me S5-pentenyl-alanine olefin amino acid connected by an all-carbon crosslinker comprising one double bond
  MISC_FEATURE (9)..(13): Crosslink between residues
  MOD_RES (13)..(13): Alpha-Me S5-pentenyl-alanine olefin amino acid connected by an all-carbon crosslinker comprising one double bond
  C-term NHiBu
RWIAQALRAIGDAFNAYYARR

SEQ ID NO: 209 - protein, 21 aa, Artificial Sequence
  Description of Artificial Sequence: Synthetic peptide
  N-term Ac
  MOD_RES (9)..(9): Alpha-Me S5-pentenyl-alanine olefin amino acid connected by an all-carbon crosslinker comprising one double bond
  MISC_FEATURE (9)..(13): Crosslink between residues
  MOD_RES (13)..(13): Alpha-Me S5-pentenyl-alanine olefin amino acid connected by an all-carbon crosslinker comprising one double bond
  C-term NHChx
RWIAQALRAIGDAFNAYYARR

SEQ ID NO: 210 - protein, 21 aa, Artificial Sequence
  Description of Artificial Sequence: Synthetic peptide
  N-term Ac
  MOD_RES (9)..(9): Alpha-Me S5-pentenyl-alanine olefin amino acid connected by an all-carbon crosslinker comprising one double bond
  MISC_FEATURE (9)..(13): Crosslink between residues
  MOD_RES (13)..(13): Alpha-Me S5-pentenyl-alanine olefin amino acid connected by an all-carbon crosslinker comprising one double bond
  C-term NHBn
RWIAQALRAIGDAFNAYYARR

SEQ ID NO: 211 - protein, 21 aa, Artificial Sequence
  Description of Artificial Sequence: Synthetic peptide
  N-term Ac
  MOD_RES (9)..(9): Alpha-Me S5-pentenyl-alanine olefin amino acid connected by an all-carbon crosslinker comprising one double bond
  MISC_FEATURE (9)..(13): Crosslink between residues
  MOD_RES (13)..(13): Alpha-Me S5-pentenyl-alanine olefin amino acid connected by an all-carbon crosslinker comprising one double bond
  C-term NHMeChx
RWIAQALRAIGDAFNAYYARR

SEQ ID NO: 212 - protein, 21 aa, Artificial Sequence
  Description of Artificial Sequence: Synthetic peptide
  N-term Ac
  MOD_RES (9)..(9): Alpha-Me S5-pentenyl-alanine olefin amino acid connected by an all-carbon crosslinker comprising one double bond
  MISC_FEATURE (9)..(13): Crosslink between residues
  MOD_RES (13)..(13): Alpha-Me S5-pentenyl-alanine olefin amino acid connected by an all-carbon crosslinker comprising one double bond
  C-term NHEtPh
RWIAQALRAIGDAFNAYYARR

SEQ ID NO: 213 - protein, 21 aa, Artificial Sequence
  Description of Artificial Sequence: Synthetic peptide
  N-term Ac
  MOD_RES (9)..(9): Alpha-Me S5-pentenyl-alanine olefin amino acid connected by an all-carbon crosslinker comprising one double bond
  MISC_FEATURE (9)..(13): Crosslink between residues
  MOD_RES (13)..(13): Alpha-Me S5-pentenyl-alanine olefin amino acid connected by an all-carbon crosslinker comprising one double bond
  C-term NHsBu
RWIAQALRAIGDAFNAYYARR

SEQ ID NO: 214 - protein, 18 aa, Artificial Sequence
  Description of Artificial Sequence: Synthetic peptide
  N-term Ac
  MOD_RES (9)..(9): Alpha-Me S5-pentenyl-alanine olefin amino acid connected by an all-carbon crosslinker comprising one double bond
  MISC_FEATURE (9)..(13): Crosslink between residues
  MOD_RES (13)..(13): Alpha-Me S5-pentenyl-alanine olefin amino acid connected by an all-carbon crosslinker comprising one double bond
  C-term NHPr
RWIAQALRAIGDAFNARR

SEQ ID NO: 215 - protein, 18 aa, Artificial Sequence
  Description of Artificial Sequence: Synthetic peptide
  N-term Ac
  MOD_RES (9)..(9): Alpha-Me S5-pentenyl-alanine olefin amino acid connected by an all-carbon crosslinker comprising one double bond
  MISC_FEATURE (9)..(13): Crosslink between residues
  MOD_RES (13)..(13): Alpha-Me S5-pentenyl-alanine olefin amino acid connected by an all-carbon crosslinker comprising one double bond
  C-term NHiBu
RWIAQALRAIGDAFNARR

SEQ ID NO: 216 - protein, 18 aa, Artificial Sequence
  Description of Artificial Sequence: Synthetic peptide
  N-term Ac
  MOD_RES (9)..(9): Alpha-Me S5-pentenyl-alanine olefin amino acid connected by an all-carbon crosslinker comprising one double bond
  MISC_FEATURE (9)..(13): Crosslink between residues
  MOD_RES (13)..(13): Alpha-Me S5-pentenyl-alanine olefin amino acid connected by an all-carbon crosslinker comprising one double bond
  C-term NHChx
RWIAQALRAIGDAFNARR

SEQ ID NO: 217 - protein, 18 aa, Artificial Sequence
  Description of Artificial Sequence: Synthetic peptide
  N-term Ac
  MOD_RES (9)..(9): Alpha-Me S5-pentenyl-alanine olefin amino acid connected by an all-carbon crosslinker comprising one double bond
  MISC_FEATURE (9)..(13): Crosslink between residues
  MOD_RES (13)..(13): Alpha-Me S5-pentenyl-alanine olefin amino acid connected by an all-carbon crosslinker comprising one double bond
  C-term NHBn
RWIAQALRAIGDAFNARR

SEQ ID NO: 218 - protein, 18 aa, Artificial Sequence
  Description of Artificial Sequence: Synthetic peptide
  N-term Ac
  MOD_RES (9)..(9): Alpha-Me S5-pentenyl-alanine olefin amino acid connected by an all-carbon crosslinker comprising one double bond
  MISC_FEATURE (9)..(13): Crosslink between residues
  MOD_RES (13)..(13): Alpha-Me S5-pentenyl-alanine olefin amino acid connected by an all-carbon crosslinker comprising one double bond
  C-term NHMeChx
RWIAQALRAIGDAFNARR

SEQ ID NO: 219 - protein, 18 aa, Artificial Sequence
  Description of Artificial Sequence: Synthetic peptide
  N-term Ac
  MOD_RES (9)..(9): Alpha-Me S5-pentenyl-alanine olefin amino acid connected by an all-carbon crosslinker comprising one double bond
  MISC_FEATURE (9)..(13): Crosslink between residues
  MOD_RES (13)..(13): Alpha-Me S5-pentenyl-alanine olefin amino acid connected by an all-carbon crosslinker comprising one double bond
  C-term NHEtPh
RWIAQALRAIGDAFNARR

SEQ ID NO: 220 - protein, 18 aa, Artificial Sequence
  Description of Artificial Sequence: Synthetic peptide
  N-term Ac
  MOD_RES (9)..(9): Alpha-Me S5-pentenyl-alanine olefin amino acid connected by an all-carbon crosslinker comprising one double bond
  MISC_FEATURE (9)..(13): Crosslink between residues
  MOD_RES (13)..(13): Alpha-Me S5-pentenyl-alanine olefin amino acid connected by an all-carbon crosslinker comprising one double bond
  C-term NHsBu
RWIAQALRAIGDAFNARR

SEQ ID NO: 221 - protein, 21 aa, Artificial Sequence
  Description of Artificial Sequence: Synthetic peptide
  N-term Ac
  MOD_RES (9)..(9): Alpha-Me S5-pentenyl-alanine olefin amino acid connected by an all-carbon crosslinker comprising one double bond
  MISC_FEATURE (9)..(13): Crosslink between residues
  MOD_RES (13)..(13): Alpha-Me S5-pentenyl-alanine olefin amino acid connected by an all-carbon crosslinker comprising one double bond
  C-term NH2
RWIAQALRAIGAAFNAYYARR

SEQ ID NO: 222 - protein, 21 aa, Artificial Sequence
  Description of Artificial Sequence: Synthetic peptide
  N-term Ac
  MOD_RES (9)..(9): Alpha-Me S5-pentenyl-alanine olefin amino acid connected by an all-carbon crosslinker comprising one double bond
  MISC_FEATURE (9)..(13): Crosslink between residues
  MOD_RES (13)..(13): Alpha-Me S5-pentenyl-alanine olefin amino acid connected by an all-carbon crosslinker comprising one double bond
  C-term NH2
RWIAQALRAIGNAFNAYYARR

SEQ ID NO: 223 - protein, 19 aa, Artificial Sequence
  Description of Artificial Sequence: Synthetic peptide
  N-term Ac
  MOD_RES (9)..(9): Alpha-Me S5-pentenyl-alanine olefin amino acid connected by an all-carbon crosslinker comprising one double bond
  MISC_FEATURE (9)..(13): Crosslink between residues
  MOD_RES (13)..(13): Alpha-Me S5-pentenyl-alanine olefin amino acid connected by an all-carbon crosslinker comprising one double bond
  C-term NH2
IWIAQALRAIGAAFNARRA

SEQ ID NO: 224 - protein, 19 aa, Artificial Sequence
  Description of Artificial Sequence: Synthetic peptide
  N-term Ac
  MOD_RES (9)..(9): Alpha-Me S5-pentenyl-alanine olefin amino acid connected by an all-carbon crosslinker comprising one double bond
  MISC_FEATURE (9)..(13): Crosslink between residues
  MOD_RES (13)..(13): Alpha-Me S5-pentenyl-alanine olefin amino acid connected by an all-carbon crosslinker comprising one double bond
  C-term NH2
IWIAQALRAIGNAFNARRA

SEQ ID NO: 225 - protein, 21 aa, Artificial Sequence
  Description of Artificial Sequence: Synthetic peptide
  N-term Ac
  MOD_RES (9)..(9): Alpha-Me S5-pentenyl-alanine olefin amino acid connected by an all-carbon crosslinker comprising one double bond
  MISC_FEATURE (9)..(13): Crosslink between residues
  MOD_RES (13)..(13): Alpha-Me S5-pentenyl-alanine olefin amino acid connected by an all-carbon crosslinker comprising one double bond
  C-term NH2
RWIAQAFRAIGDAFNAYYARR

SEQ ID NO: 226 - protein, 23 aa, Artificial Sequence
  Description of Artificial Sequence: Synthetic peptide
  N-term H
  MOD_RES (2)..(2): 6-aminohexanoic acid
  C-term NH2
CXIWIAQELRRIGDEFNAYYARR

SEQ ID NO: 227 - protein, 23 aa, Artificial Sequence
  Description of Artificial Sequence: Synthetic peptide
  N-term H
  MOD_RES (2)..(2): 6-aminohexanoic acid
  MOD_RES (11)..(11): Alpha-Me S5-pentenyl-alanine olefin amino acid connected by an all-carbon crosslinker comprising one double bond
  MISC_FEATURE (11)..(15): Crosslink between residues
  MOD_RES (15)..(15): Alpha-Me S5-pentenyl-alanine olefin amino acid connected by an all-carbon crosslinker comprising one double bond
  C-term NH2
CXIWIAQELRAIGDAFNAYYARR

SEQ ID NO: 228 - protein, 19 aa, Artificial Sequence
  Description of Artificial Sequence: Synthetic peptide
  N-term Pr
  MOD_RES (9)..(9): Alpha-Me S5-pentenyl-alanine olefin amino acid connected by an all-carbon crosslinker comprising one double bond
  MISC_FEATURE (9)..(13): Crosslink between residues
  MOD_RES (13)..(13): Alpha-Me S5-pentenyl-alanine olefin amino acid connected by an all-carbon crosslinker comprising one double bond
  C-term NH2
IPIAQALRAIGDAFNARRA

SEQ ID NO: 229 - protein, 19 aa, Artificial Sequence
  Description of Artificial Sequence: Synthetic peptide
  N-term Pr
  MOD_RES (9)..(9): Alpha-Me S5-pentenyl-alanine olefin amino acid connected by an all-carbon crosslinker comprising one double bond
  MISC_FEATURE (9)..(13): Crosslink between residues
  MOD_RES (13)..(13): Alpha-Me S5-pentenyl-alanine olefin amino acid connected by an all-carbon crosslinker comprising one double bond
  C-term NH2
PWIAQALRAIGDAFNARRA

SEQ ID NO: 230 - protein, 23 aa, Artificial Sequence
  Description of Artificial Sequence: Synthetic peptide
  N-term KLH
  MOD_RES (2)..(2): 6-aminohexanoic acid
  C-term NH2
CXIWIAQELRRIGDEFNAYYARR

SEQ ID NO: 231 - protein, 23 aa, Artificial Sequence
  Description of Artificial Sequence: Synthetic peptide
  N-term OVA
  MOD_RES (2)..(2): 6-aminohexanoic acid
  C-term NH2
CXIWIAQELRRIGDEFNAYYARR

SEQ ID NO: 232 - protein, 23 aa, Artificial Sequence
  Description of Artificial Sequence: Synthetic peptide
  N-term KLH
  MOD_RES (2)..(2): 6-aminohexanoic acid
  MOD_RES (11)..(11): Alpha-Me S5-pentenyl-alanine olefin amino acid connected by an all-carbon crosslinker comprising one double bond
  MISC_FEATURE (11)..(15): Crosslink between residues
  MOD_RES (15)..(15): Alpha-Me S5-pentenyl-alanine olefin amino acid connected by an all-carbon crosslinker comprising one double bond
  C-term NH2
CXIWIAQELRAIGDAFNAYYARR

SEQ ID NO: 233 - protein, 23 aa, Artificial Sequence
  Description of Artificial Sequence: Synthetic peptide
  N-term OVA
  MOD_RES (2)..(2): 6-aminohexanoic acid
  MOD_RES (11)..(11): Alpha-Me S5-pentenyl-alanine olefin amino acid connected by an all-carbon crosslinker comprising one double bond
  MISC_FEATURE (11)..(15): Crosslink between residues
  MOD_RES (15)..(15): Alpha-Me S5-pentenyl-alanine olefin amino acid connected by an all-carbon crosslinker comprising one double bond
  C-term NH2
CXIWIAQELRAIGDAFNAYYARR

SEQ ID NO: 234 - protein, 19 aa, Artificial Sequence
  Description of Artificial Sequence: Synthetic peptide
  N-term Ac
  MOD_RES (9)..(9): Alpha-Me S5-pentenyl-alanine olefin amino acid connected by an all-carbon crosslinker comprising one double bond
  MISC_FEATURE (9)..(13): Crosslink between residues
  MOD_RES (13)..(13): Alpha-Me S5-pentenyl-alanine olefin amino acid connected by an all-carbon crosslinker comprising one double bond
  C-term NH2
IWIAEELAAIGDAFDAYYA

SEQ ID NO: 235 - protein, 20 aa, Artificial Sequence
  Description of Artificial Sequence: Synthetic peptide
  N-term FITC
  MOD_RES (1)..(1): Beta-Ala
  MOD_RES (10)..(10): Alpha-Me S5-pentenyl-alanine olefin amino acid connected by an all-carbon crosslinker comprising one double bond
  MISC_FEATURE (10)..(14): Crosslink between residues
  MOD_RES (14)..(14): Alpha-Me S5-pentenyl-alanine olefin amino acid connected by an all-carbon crosslinker comprising one double bond
  C-term NH2
AIWIAEELAAIGDAFDAYYA

SEQ ID NO: 236 - protein, 21 aa, Artificial Sequence
  Description of Artificial Sequence: Synthetic peptide
  N-term Ac
  MOD_RES (9)..(9): Alpha-Me S5-pentenyl-alanine olefin amino acid connected by an all-carbon crosslinker comprising one double bond
  MISC_FEATURE (9)..(13): Crosslink between residues
  MOD_RES (13)..(13): Alpha-Me S5-pentenyl-alanine olefin amino acid connected by an all-carbon crosslinker comprising one double bond
  C-term NH2
IWIAEELAAIGDAFDAYYAAA

SEQ ID NO: 237 - protein, 22 aa, Artificial Sequence
  Description of Artificial Sequence: Synthetic peptide
  N-term FITC
  MOD_RES (1)..(1): Beta-Ala
  MOD_RES (10)..(10): Alpha-Me S5-pentenyl-alanine olefin amino acid connected by an all-carbon crosslinker comprising one double bond
  MISC_FEATURE (10)..(14): Crosslink between residues
  MOD_RES (14)..(14): Alpha-Me S5-pentenyl-alanine olefin amino acid connected by an all-carbon crosslinker comprising one double bond
  C-term NH2
AIWIAEELAAIGDAFDAYYAAA

SEQ ID NO: 238 - protein, 21 aa, Artificial Sequence
  Description of Artificial Sequence: Synthetic peptide
  N-term Ac
  MOD_RES (9)..(9): Alpha-Me S5-pentenyl-alanine olefin amino acid connected by an all-carbon crosslinker comprising one double bond
  MISC_FEATURE (9)..(13): Crosslink between residues
  MOD_RES (13)..(13): Alpha-Me S5-pentenyl-alanine olefin amino acid connected by an all-carbon crosslinker comprising one double bond
  C-term NH2
RWIAQALRAIGDAFNAYKARR

SEQ ID NO: 239 - protein, 21 aa, Artificial Sequence
  Description of Artificial Sequence: Synthetic peptide
  N-term Ac
  MOD_RES (9)..(9): Alpha-Me S5-pentenyl-alanine olefin amino acid connected by an all-carbon crosslinker comprising one double bond
  MISC_FEATURE (9)..(13): Crosslink between residues
  MOD_RES (13)..(13): Alpha-Me S5-pentenyl-alanine olefin amino acid connected by an all-carbon crosslinker comprising one double bond
  C-term NH2
RWIAQQLRAIGDAFNAYKARR

SEQ ID NO: 240 - protein, 18 aa, Artificial Sequence
  Description of Artificial Sequence: Synthetic peptide
  N-term Ac
  MOD_RES (9)..(9): Alpha-Me S5-pentenyl-alanine olefin amino acid connected by an all-carbon crosslinker comprising one double bond
  MISC_FEATURE (9)..(13): Crosslink between residues
  MOD_RES (13)..(13): Alpha-Me S5-pentenyl-alanine olefin amino acid connected by an all-carbon crosslinker comprising one double bond
  C-term NH2
RWIAQALRAIGDAFNAYK

SEQ ID NO: 241 - protein, 18 aa, Artificial Sequence
  Description of Artificial Sequence: Synthetic peptide
  N-term Ac
  MOD_RES (9)..(9): Alpha-Me S5-pentenyl-alanine olefin amino acid connected by an all-carbon crosslinker comprising one double bond
  MISC_FEATURE (9)..(13): Crosslink between residues
  MOD_RES (13)..(13): Alpha-Me S5-pentenyl-alanine olefin amino acid connected by an all-carbon crosslinker comprising one double bond
  C-term NH2
RWIAQALRAIGDAFNAFK

SEQ ID NO: 242 - protein, 21 aa, Artificial Sequence
  Description of Artificial Sequence: Synthetic peptide
  N-term Ac
  MOD_RES (9)..(9): Alpha-Me S5-pentenyl-alanine olefin amino acid connected by an all-carbon crosslinker comprising one double bond
  MISC_FEATURE (9)..(13): Crosslink between residues
  MOD_RES (13)..(13): Alpha-Me S5-pentenyl-alanine olefin amino acid connected by an all-carbon crosslinker comprising one double bond
  MOD_RES (14)..(14): homo-Phe
  C-term NH2
RWIAQALRAIGDAFNAYYARR

SEQ ID NO: 243 - protein, 21 aa, Artificial Sequence
  Description of Artificial Sequence: Synthetic peptide
  N-term Ac
  MOD_RES (9)..(9): Alpha-Me S5-pentenyl-alanine olefin amino acid connected by an all-carbon crosslinker comprising one double bond
  MISC_FEATURE (9)..(13): Crosslink between residues
  MOD_RES (13)..(13): Alpha-Me S5-pentenyl-alanine olefin amino acid connected by an all-carbon crosslinker comprising one double bond
  MOD_RES (14)..(14): 1-Naphthalanine
  C-term NH2
RWIAQALRAIGDAANAYYARR

SEQ ID NO: 244 - protein, 21 aa, Artificial Sequence
  Description of Artificial Sequence: Synthetic peptide
  N-term Ac
  MOD_RES (9)..(9): Alpha-Me S5-pentenyl-alanine olefin amino acid connected by an all-carbon crosslinker comprising one double bond
  MISC_FEATURE (9)..(13): Crosslink between residues
  MOD_RES (13)..(13): Alpha-Me S5-pentenyl-alanine olefin amino acid connected by an all-carbon crosslinker comprising one double bond
  MOD_RES (14)..(14): 2-Naphthalanine
  C-term NH2
RWIAQALRAIGDAANAYYARR

SEQ ID NO: 245 - protein, 21 aa, Artificial Sequence
  Description of Artificial Sequence: Synthetic peptide
  N-term Ac
  MOD_RES (2)..(2): 2-Naphthalanine
  MOD_RES (9)..(9): Alpha-Me S5-pentenyl-alanine olefin amino acid connected by an all-carbon crosslinker comprising one double bond
  MISC_FEATURE (9)..(13): Crosslink between residues
  MOD_RES (13)..(13): Alpha-Me S5-pentenyl-alanine olefin amino acid connected by an all-carbon crosslinker comprising one double bond
  C-term NH2
RAIAQALRAIGDAFNAYYARR

SEQ ID NO: 246 - protein, 21 aa, Artificial Sequence
  Description of Artificial Sequence: Synthetic peptide
  N-term Ac
  MOD_RES (2)..(2): homo-Phe
  MOD_RES (9)..(9): Alpha-Me S5-pentenyl-alanine olefin amino acid connected by an all-carbon crosslinker comprising one double bond
  MISC_FEATURE (9)..(13): Crosslink between residues
  MOD_RES (13)..(13): Alpha-Me S5-pentenyl-alanine olefin amino acid connected by an all-carbon crosslinker comprising one double bond
  C-term NH2
RFIAQALRAIGDAFNAYYARR

SEQ ID NO: 247 - protein, 21 aa, Artificial Sequence
  Description of Artificial Sequence: Synthetic peptide
  N-term Ac
  MOD_RES (9)..(9): Alpha-Me S5-pentenyl-alanine olefin amino acid connected by an all-carbon crosslinker comprising one double bond
  MISC_FEATURE (9)..(13): Crosslink between residues
  MOD_RES (12)..(12): Norleucine
  MOD_RES (13)..(13): Alpha-Me S5-pentenyl-alanine olefin amino acid connected by an all-carbon crosslinker comprising one double bond
  C-term NH2
RWIAQALRAIGLAFNAYYARR

SEQ ID NO: 248 - protein, 21 aa, Artificial Sequence
  Description of Artificial Sequence: Synthetic peptide
  N-term Ac
  MOD_RES (3)..(3): Norleucine
  MOD_RES (9)..(9): Alpha-Me S5-pentenyl-alanine olefin amino acid connected by an all-carbon crosslinker comprising one double bond
  MISC_FEATURE (9)..(13): Crosslink between residues
  MOD_RES (13)..(13): Alpha-Me S5-pentenyl-alanine olefin amino acid connected by an all-carbon crosslinker comprising one double bond
  C-term NH2
RWLAQALRAIGDAFNAYYARR

SEQ ID NO: 249 - protein, 21 aa, Artificial Sequence
  Description of Artificial Sequence: Synthetic peptide
  N-term Ac
  MOD_RES (6)..(6): Norleucine
  MOD_RES (9)..(9): Alpha-Me S5-pentenyl-alanine olefin amino acid connected by an all-carbon crosslinker comprising one double bond
  MISC_FEATURE (9)..(13): Crosslink between residues
  MOD_RES (13)..(13): Alpha-Me S5-pentenyl-alanine olefin amino acid connected by an all-carbon crosslinker comprising one double bond
  C-term NH2
RWIAQLLRAIGDAFNAYYARR

SEQ ID NO: 250 - protein, 18 aa, Artificial Sequence
  Description of Artificial Sequence: Synthetic peptide
  N-term Ac
  MOD_RES (9)..(9): Alpha-Me S5-pentenyl-alanine olefin amino acid connected by an all-carbon crosslinker comprising one double bond
  MISC_FEATURE (9)..(13): Crosslink between residues
  MOD_RES (13)..(13): Alpha-Me S5-pentenyl-alanine olefin amino acid connected by an all-carbon crosslinker comprising one double bond
  C-term NH2
RWIAQQLRAIGDAFNAYK

SEQ ID NO: 251 - protein, 23 aa, Artificial Sequence
  Description of Artificial Sequence: Synthetic peptide
  N-term H
  MOD_RES (2)..(2): 6-aminohexanoic acid
  MOD_RES (11)..(11): Alpha-Me S5-pentenyl-alanine olefin amino acid connected by an all-carbon crosslinker comprising one double bond
  MISC_FEATURE (11)..(15): Crosslink between residues
  MOD_RES (15)..(15): Alpha-Me S5-pentenyl-alanine olefin amino acid connected by an all-carbon crosslinker comprising one double bond
  C-term NH2
CXIWIAQELRAIEDAFNAYYARR

SEQ ID NO: 252 - protein, 21 aa, Artificial Sequence
  Description of Artificial Sequence: Synthetic peptide
  N-term Ac
  MOD_RES (9)..(9): Alpha-Me S5-pentenyl-alanine olefin amino acid connected by an all-carbon crosslinker comprising one double bond
  MISC_FEATURE (9)..(13): Crosslink between residues
  MOD_RES (13)..(13): Alpha-Me S5-pentenyl-alanine olefin amino acid connected by an all-carbon crosslinker comprising one double bond
  MOD_RES (18)..(18): Ornithine
  C-term NH2
IWIAQALRAIGDAFNAYXARR

SEQ ID NO: 253 - protein, 18 aa, Artificial Sequence
  Description of Artificial Sequence: Synthetic peptide
  N-term Ac
  MOD_RES (9)..(9): Alpha-Me S5-pentenyl-alanine olefin amino acid connected by an all-carbon crosslinker comprising one double bond
  MISC_FEATURE (9)..(13): Crosslink between residues
  MOD_RES (13)..(13): Alpha-Me S5-pentenyl-alanine olefin amino acid connected by an all-carbon crosslinker comprising one double bond
  MOD_RES (18)..(18): Ornithine
  C-term NH2
IWIAQALRAIGDAFNAYX

SEQ ID NO: 254 - protein, 18 aa, Artificial Sequence
  Description of Artificial Sequence: Synthetic peptide
  N-term Ac
  MOD_RES (9)..(9): Alpha-Me S5-pentenyl-alanine olefin amino acid connected by an all-carbon crosslinker comprising one double bond
  MISC_FEATURE (9)..(13): Crosslink between residues
  MOD_RES (13)..(13): Alpha-Me S5-pentenyl-alanine olefin amino acid connected by an all-carbon crosslinker comprising one double bond
  C-term NH2
IWIAQALRAIGDAFNAYR

SEQ ID NO: 255 - protein, 19 aa, Artificial Sequence
  Description of Artificial Sequence: Synthetic peptide
  N-term Ac
  MOD_RES (9)..(9): Alpha-Me S5-pentenyl-alanine olefin amino acid connected by an all-carbon crosslinker comprising one double bond
  MISC_FEATURE (9)..(13): Crosslink between residues
  MOD_RES (13)..(13): Alpha-Me S5-pentenyl-alanine olefin amino acid connected by an all-carbon crosslinker comprising one double bond
  C-term NH2
IWIAQALRAIGDAFNAYRA

SEQ ID NO: 256 - protein, 19 aa, Artificial Sequence
  Description of Artificial Sequence: Synthetic peptide
  N-term Ac
  MOD_RES (9)..(9): Alpha-Me S5-pentenyl-alanine olefin amino acid connected by an all-carbon crosslinker comprising one double bond
  MISC_FEATURE (9)..(13): Crosslink between residues
  MOD_RES (13)..(13): Alpha-Me S5-pentenyl-alanine olefin amino acid connected by an all-carbon crosslinker comprising one double bond
  C-term NH2
IWIAQALRAIFDAFNARRA

SEQ ID NO: 257 - protein, 19 aa, Artificial Sequence
  Description of Artificial Sequence: Synthetic peptide
  N-term Ac
  MOD_RES (9)..(9): Alpha-Me S5-pentenyl-alanine olefin amino acid connected by an all-carbon crosslinker comprising one double bond
  MISC_FEATURE (9)..(13): Crosslink between residues
  MOD_RES (13)..(13): Alpha-Me S5-pentenyl-alanine olefin amino acid connected by an all-carbon crosslinker comprising one double bond
  C-term NH2
RWIAQALRAIGDAFNARRA

SEQ ID NO: 258 - protein, 21 aa, Artificial Sequence
  Description of Artificial Sequence: Synthetic peptide
  N-term Ac
  MOD_RES (9)..(9): Alpha-Me S5-pentenyl-alanine olefin amino acid connected by an all-carbon crosslinker comprising one double bond
  MISC_FEATURE (9)..(13): Crosslink between residues
  MOD_RES (10)..(10): Cyclohexyl-Gly
  MOD_RES (13)..(13): Alpha-Me S5-pentenyl-alanine olefin amino acid connected by an all-carbon crosslinker comprising one double bond
  C-term NH2
IWIAQELRAGGDAFNAYYARR

SEQ ID NO: 259 - protein, 18 aa, Artificial Sequence
  Description of Artificial Sequence: Synthetic peptide
  N-term Ac
  MOD_RES (9)..(9): Alpha-Me S5-pentenyl-alanine olefin amino acid connected by an all-carbon crosslinker comprising one double bond
  MISC_FEATURE (9)..(13): Crosslink between residues
  MOD_RES (13)..(13): Alpha-Me S5-pentenyl-alanine olefin amino acid connected by an all-carbon crosslinker comprising one double bond
  C-term NH2
IWIAQQLRAIGDAFNAYY

SEQ ID NO: 260 - protein, 21 aa, Artificial Sequence
  Description of Artificial Sequence: Synthetic peptide
  N-term Ac
  MOD_RES (6)..(6): Alpha-Me S5-pentenyl-alanine olefin amino acid connected by an all-carbon crosslinker comprising one double bond
  MISC_FEATURE (6)..(10): Crosslink between residues
  MOD_RES (10)..(10): Alpha-Me S5-pentenyl-alanine olefin amino acid connected by an all-carbon crosslinker comprising one double bond
  C-term NH2
IWIAQALRAAGDQFNAYYARR

SEQ ID NO: 261 - protein, 18 aa, Artificial Sequence
  Description of Artificial Sequence: Synthetic peptide
  N-term Ac
  MOD_RES (9)..(9): Alpha-Me S5-pentenyl-alanine olefin amino acid connected by an all-carbon crosslinker comprising one double bond
  MISC_FEATURE (9)..(13): Crosslink between residues
  MOD_RES (13)..(13): Alpha-Me S5-pentenyl-alanine olefin amino acid connected by an all-carbon crosslinker comprising one double bond
  MOD_RES (15)..(15): 2-aminoisobutyric acid
  C-term NH2
IWIAQALRAIGDAFXAYK

SEQ ID NO: 262 - protein, 21 aa, Artificial Sequence
  Description of Artificial Sequence: Synthetic peptide
  N-term Ac
  MOD_RES (9)..(9): Alpha-Me S5-pentenyl-alanine olefin amino acid connected by an all-carbon crosslinker comprising one double bond
  MISC_FEATURE (9)..(13): Crosslink between residues
  MOD_RES (13)..(13): Alpha-Me S5-pentenyl-alanine olefin amino acid connected by an all-carbon crosslinker comprising one double bond
  MOD_RES (15)..(15): 2-aminoisobutyric acid
  C-term NH2
IWIAQALRAIGDAFXAYYARR

SEQ ID NO: 263 - protein, 21 aa, Artificial Sequence
  Description of Artificial Sequence: Synthetic peptide
  N-term Ac
  MOD_RES (9)..(9): Alpha-Me S5-pentenyl-alanine olefin amino acid connected by an all-carbon crosslinker comprising one double bond
  MISC_FEATURE (9)..(13): Crosslink between residues
  MOD_RES (13)..(13): Alpha-Me S5-pentenyl-alanine olefin amino acid connected by an all-carbon crosslinker comprising one double bond
  C-term NH2
IWIAQALRAIGNAFNAFYARR

SEQ ID NO: 264 - protein, 21 aa, Artificial Sequence
  Description of Artificial Sequence: Synthetic peptide
  N-term Ac
  MOD_RES (9)..(9): Alpha-Me S5-pentenyl-alanine olefin amino acid connected by an all-carbon crosslinker comprising one double bond
  MISC_FEATURE (9)..(13): Crosslink between residues
  MOD_RES (13)..(13): Alpha-Me S5-pentenyl-alanine olefin amino acid connected by an all-carbon crosslinker comprising one double bond
  C-term NH2
RWIAQALRAIGNAFNAFYARR

SEQ ID NO: 265 - protein, 21 aa, Artificial Sequence
  Description of Artificial Sequence: Synthetic peptide
  N-term Ac
  MOD_RES (6)..(6): 2-aminoisobutyric acid
  MOD_RES (9)..(9): Alpha-Me S5-pentenyl-alanine olefin amino acid connected by an all-carbon crosslinker comprising one double bond
  MISC_FEATURE (9)..(13): Crosslink between residues
  MOD_RES (13)..(13): Alpha-Me S5-pentenyl-alanine olefin amino acid connected by an all-carbon crosslinker comprising one double bond
  C-term NH2
IWIAQXLRAIGNAFNAFYARR

SEQ ID NO: 266 - protein, 21 aa, Artificial Sequence
  Description of Artificial Sequence: Synthetic peptide
  N-term Ac
  MOD_RES (9)..(9): Alpha-Me S5-pentenyl-alanine olefin amino acid connected by an all-carbon crosslinker comprising one double bond
  MISC_FEATURE (9)..(13): Crosslink between residues
  MOD_RES (13)..(13): Alpha-Me S5-pentenyl-alanine olefin amino acid connected by an all-carbon crosslinker comprising one double bond
  MOD_RES (16)..(16): 2-aminoisobutyric acid
  C-term NH2
IWIAQALRAIGNAFNXFYARR

SEQ ID NO: 267 - protein, 21 aa, Artificial Sequence
  Description of Artificial Sequence: Synthetic peptide
  N-term Ac
  MOD_RES (6)..(6): 2-aminoisobutyric acid
  MOD_RES (9)..(9): Alpha-Me S5-pentenyl-alanine olefin amino acid connected by an all-carbon crosslinker comprising one double bond
  MISC_FEATURE (9)..(13): Crosslink between residues
  MOD_RES (13)..(13): Alpha-Me S5-pentenyl-alanine olefin amino acid connected by an all-carbon crosslinker comprising one double bond
  MOD_RES (16)..(16): 2-aminoisobutyric acid
  C-term NH2
IWIAQXLRAIGNAFNXFYARR

SEQ ID NO: 268 - protein, 21 aa, Artificial Sequence
  Description of Artificial Sequence: Synthetic peptide
  N-term Pr
  MOD_RES (3)..(3): Cyclohexyl-Gly
  MOD_RES (9)..(9): Alpha-Me S5-pentenyl-alanine olefin amino acid connected by an all-carbon crosslinker comprising one double bond
  MISC_FEATURE (9)..(13): Crosslink between residues
  MOD_RES (11)..(11): 2-aminoisobutyric acid
  MOD_RES (13)..(13): Alpha-Me S5-pentenyl-alanine olefin amino acid connected by an all-carbon crosslinker comprising one double bond
  C-term NH2
RNGARHLAAVXDAFNAFYARR

SEQ ID NO: 269 - protein, 21 aa, Artificial Sequence
  Description of Artificial Sequence: Synthetic peptide
  N-term Ac
  MOD_RES (9)..(9): Alpha-Me S5-pentenyl-alanine olefin amino acid connected by an all-carbon crosslinker comprising one double bond
  MISC_FEATURE (9)..(13): Crosslink between residues
  MOD_RES (13)..(13): Alpha-Me S5-pentenyl-alanine olefin amino acid connected by an all-carbon crosslinker comprising one double bond
  C-term NH2
IWIAQAARAIGDAFNAYYARR

SEQ ID NO: 270 - protein, 21 aa, Artificial Sequence
  Description of Artificial Sequence: Synthetic peptide
  N-term Ac
  MOD_RES (9)..(9): Alpha-Me S5-pentenyl-alanine olefin amino acid connected by an all-carbon crosslinker comprising one double bond
  MISC_FEATURE (9)..(13): Crosslink between residues
  MOD_RES (13)..(13): Alpha-Me S5-pentenyl-alanine olefin amino acid connected by an all-carbon crosslinker comprising one double bond
  C-term NH2
IWIAQAARAIGDAANAYYARR

SEQ ID NO: 271 - protein, 21 aa, Artificial Sequence
  Description of Artificial Sequence: Synthetic peptide
  N-term Ac
  MOD_RES (9)..(9): Alpha-Me S5-pentenyl-alanine olefin amino acid connected by an all-carbon crosslinker comprising one double bond
  MISC_FEATURE (9)..(13): Crosslink between residues
  MOD_RES (13)..(13): Alpha-Me S5-pentenyl-alanine olefin amino acid connected by an all-carbon crosslinker comprising one double bond
  C-term NH2
IWIAQAARAIGAAANAYYARR

SEQ ID NO: 272 - protein, 21 aa, Artificial Sequence
  Description of Artificial Sequence: Synthetic peptide
  N-term Ac
  MOD_RES (9)..(9): Alpha-Me S5-pentenyl-alanine olefin amino acid connected by an all-carbon crosslinker comprising one double bond
  MISC_FEATURE (9)..(13): Crosslink between residues
  MOD_RES (13)..(13): Alpha-Me S5-pentenyl-alanine olefin amino acid connected by an all-carbon crosslinker comprising one double bond
  C-term NH2
IWIAQAARAIEAAANAYYARR

SEQ ID NO: 273 - protein, 21 aa, Artificial Sequence
  Description of Artificial Sequence: Synthetic peptide
  N-term Ac
  MOD_RES (9)..(9): Alpha-Me S5-pentenyl-alanine olefin amino acid connected by an all-carbon crosslinker comprising one double bond
  MISC_FEATURE (9)..(13): Crosslink between residues
  MOD_RES (13)..(13): Alpha-Me S5-pentenyl-alanine olefin amino acid connected by an all-carbon crosslinker comprising one double bond
  C-term NH2
IWIAQALRADIGAFNAYYARR

SEQ ID NO: 274 - protein, 21 aa, Artificial Sequence
  Description of Artificial Sequence: Synthetic peptide
  N-term Ac
  MOD_RES (9)..(9): Alpha-Me S5-pentenyl-alanine olefin amino acid connected by an all-carbon crosslinker comprising one double bond
  MISC_FEATURE (9)..(13): Crosslink between residues
  MOD_RES (13)..(13): Alpha-Me S5-pentenyl-alanine olefin amino acid connected by an all-carbon crosslinker comprising one double bond
  C-term NH2
IWIAQAARADIGAANAYYARR

SEQ ID NO: 275 - protein, 21 aa, Artificial Sequence
  Description of Artificial Sequence: Synthetic peptide
  N-term Ac
  MOD_RES (9)..(9): Alpha-Me S5-pentenyl-alanine olefin amino acid connected by an all-carbon crosslinker comprising one double bond
  MISC_FEATURE (9)..(13): Crosslink between residues
  MOD_RES (13)..(13): Alpha-Me S5-pentenyl-alanine olefin amino acid connected by an all-carbon crosslinker comprising one double bond
  C-term NH2
IWIAQALRAIEDAFNAYYARR

SEQ ID NO: 276 - protein, 21 aa, Artificial Sequence
  Description of Artificial Sequence: Synthetic peptide
  N-term Ac
  MOD_RES (9)..(9): Alpha-Me S5-pentenyl-alanine olefin amino acid connected by an all-carbon crosslinker comprising one double bond
  MISC_FEATURE (9)..(13): Crosslink between residues
  MOD_RES (13)..(13): Alpha-Me S5-pentenyl-alanine olefin amino acid connected by an all-carbon crosslinker comprising one double bond
  C-term NH2
IWIAQALDAIGRAFNAYYARR

SEQ ID NO: 277 - protein, 21 aa, Artificial Sequence
  Description of Artificial Sequence: Synthetic peptide
  N-term Ac
  MOD_RES (9)..(9): Alpha-Me S5-pentenyl-alanine olefin amino acid connected by an all-carbon crosslinker comprising one double bond
  MISC_FEATURE (9)..(13): Crosslink between residues
  MOD_RES (13)..(13): Alpha-Me S5-pentenyl-alanine olefin amino acid connected by an all-carbon crosslinker comprising one double bond
  C-term NH2
IWIAQAADAIGRAANAYYARR

SEQ ID NO: 278 - protein, 21 aa, Artificial Sequence
  Description of Artificial Sequence: Synthetic peptide
  N-term Ac
  MOD_RES (9)..(9): Alpha-Me S5-pentenyl-alanine olefin amino acid connected by an all-carbon crosslinker comprising one double bond
  MISC_FEATURE (9)..(13): Crosslink between residues
  MOD_RES (13)..(13): Alpha-Me S5-pentenyl-alanine olefin amino acid connected by an all-carbon crosslinker comprising one double bond
  C-term NH2
IWIAQAADAIERAANAYYARR

SEQ ID NO: 279 - protein, 21 aa, Artificial Sequence
  Description of Artificial Sequence: Synthetic peptide
  N-term Ac
  MOD_RES (6)..(6): 2-aminoisobutyric acid
  MOD_RES (9)..(9): Alpha-Me S5-pentenyl-alanine olefin amino acid connected by an all-carbon crosslinker comprising one double bond
  MISC_FEATURE (9)..(13): Crosslink between residues
  MOD_RES (13)..(13): Alpha-Me S5-pentenyl-alanine olefin amino acid connected by an all-carbon crosslinker comprising one double bond
  MOD_RES (16)..(16): 2-aminoisobutyric acid
  C-term NH2
IWIAQXLRAIGDAFNXYYARR

SEQ ID NO: 280 - protein, 19 aa, Artificial Sequence
  Description of Artificial Sequence: Synthetic peptide
  N-term Ac
  MOD_RES (9)..(9): Alpha-Me S5-pentenyl-alanine olefin amino acid connected by an all-carbon crosslinker comprising one double bond
  MISC_FEATURE (9)..(13): Crosslink between residues
  MOD_RES (13)..(13): Alpha-Me S5-pentenyl-alanine olefin amino acid connected by an all-carbon crosslinker comprising one double bond
  C-term NH2
IWIAQQLRAIGDAFNAYRA

SEQ ID NO: 281 - protein, 21 aa, Artificial Sequence
  Description of Artificial Sequence: Synthetic peptide
  N-term Ac
  MOD_RES (4)..(4): Alpha-Me S5-pentenyl-alanine olefin amino acid connected by an all-carbon crosslinker comprising one double bond
  MISC_FEATURE (4)..(8): Crosslink between residues
  MOD_RES (8)..(8): Alpha-Me S5-pentenyl-alanine olefin amino acid connected by an all-carbon crosslinker comprising one double bond
  MOD_RES (13)..(13): 2-aminoisobutyric acid
  C-term NH2
IWIAQALARIGDXFNAYYARR

SEQ ID NO: 282 - protein, 21 aa, Artificial Sequence
  Description of Artificial Sequence: Synthetic peptide
  N-term t-Bu-U
  MOD_RES (9)..(9): Alpha-Me S5-pentenyl-alanine olefin amino acid connected by an all-carbon crosslinker comprising one double bond
  MISC_FEATURE (9)..(13): Crosslink between residues
  MOD_RES (13)..(13): Alpha-Me S5-pentenyl-alanine olefin amino acid connected by an all-carbon crosslinker comprising one double bond
  C-term NH2
IWIAQELRAIGDAFNAYYARR

SEQ ID NO: 283 - protein, 21 aa, Artificial Sequence
  Description of Artificial Sequence: Synthetic peptide
  N-term non-U
  MOD_RES (9)..(9): Alpha-Me S5-pentenyl-alanine olefin amino acid connected by an all-carbon crosslinker comprising one double bond
  MISC_FEATURE (9)..(13): Crosslink between residues
  MOD_RES (13)..(13): Alpha-Me S5-pentenyl-alanine olefin amino acid connected by an all-carbon crosslinker comprising one double bond
  C-term NH2
IWIAQELRAIGDAFNAYYARR

SEQ ID NO: 284 - protein, 21 aa, Artificial Sequence
  Description of Artificial Sequence: Synthetic peptide
  N-term Et-U
  MOD_RES (9)..(9): Alpha-Me S5-pentenyl-alanine olefin amino acid connected by an all-carbon crosslinker comprising one double bond
  MISC_FEATURE (9)..(13): Crosslink between residues
  MOD_RES (13)..(13): Alpha-Me S5-pentenyl-alanine olefin amino acid connected by an all-carbon crosslinker comprising one double bond
  C-term NH2
IWIAQELRAIGDAFNAYYARR

SEQ ID NO: 285 - protein, 21 aa, Artificial Sequence
  Description of Artificial Sequence: Synthetic peptide
  N-term Chx-U
  MOD_RES (9)..(9): Alpha-Me S5-pentenyl-alanine olefin amino acid connected by an all-carbon crosslinker comprising one double bond
  MISC_FEATURE (9)..(13): Crosslink between residues
  MOD_RES (13)..(13): Alpha-Me S5-pentenyl-alanine olefin amino acid connected by an all-carbon crosslinker comprising one double bond
  C-term NH2
IWIAQELRAIGDAFNAYYARR

SEQ ID NO: 286 - protein, 21 aa, Artificial Sequence
  Description of Artificial Sequence: Synthetic peptide
  N-term iPr-U
  MOD_RES (9)..(9): Alpha-Me S5-pentenyl-alanine olefin amino acid connected by an all-carbon crosslinker comprising one double bond
  MISC_FEATURE (9)..(13): Crosslink between residues
  MOD_RES (13)..(13): Alpha-Me S5-pentenyl-alanine olefin amino acid connected by an all-carbon crosslinker comprising one double bond
  C-term NH2
IWIAQELRAIGDAFNAYYARR

SEQ ID NO: 287 - protein, 21 aa, Artificial Sequence
  Description of Artificial Sequence: Synthetic peptide
  N-term Ph-U
  MOD_RES (9)..(9): Alpha-Me S5-pentenyl-alanine olefin amino acid connected by an all-carbon crosslinker comprising one double bond
  MISC_FEATURE (9)..(13): Crosslink between residues
  MOD_RES (13)..(13): Alpha-Me S5-pentenyl-alanine olefin amino acid connected by an all-carbon crosslinker comprising one double bond
  C-term NH2
IWIAQELRAIGDAFNAYYARR

SEQ ID NO: 288 - protein, 21 aa, Artificial Sequence
  Description of Artificial Sequence: Synthetic peptide
  N-term NH2CO
  MOD_RES (9)..(9): Alpha-Me S5-pentenyl-alanine olefin amino acid connected by an all-carbon crosslinker comprising one double bond
  MISC_FEATURE (9)..(13): Crosslink between residues
  MOD_RES (13)..(13): Alpha-Me S5-pentenyl-alanine olefin amino acid connected by an all-carbon crosslinker comprising one double bond
  C-term NH2
IWIAQELRAIGDAFNAYYARR

SEQ ID NO: 289 - protein, 21 aa, Artificial Sequence
  Description of Artificial Sequence: Synthetic peptide
  N-term Ac
  MOD_RES (9)..(9): Alpha-Me S5-pentenyl-alanine olefin amino acid connected by an all-carbon crosslinker comprising one double bond
  MISC_FEATURE (9)..(13): Crosslink between residues
  MOD_RES (13)..(13): Alpha-Me S5-pentenyl-alanine olefin amino acid connected by an all-carbon crosslinker comprising one double bond
  C-term NH2
IWIAQAARAIGRAANAYYARR

SEQ ID NO: 290 - protein, 21 aa, Artificial Sequence
  Description of Artificial Sequence: Synthetic peptide
  N-term Ac
  MOD_RES (9)..(9): Alpha-Me S5-pentenyl-alanine olefin amino acid connected by an all-carbon crosslinker comprising one double bond
  MISC_FEATURE (9)..(13): Crosslink between residues
  MOD_RES (13)..(13): Alpha-Me S5-pentenyl-alanine olefin amino acid connected by an all-carbon crosslinker comprising one double bond
  C-term NH2
IWIAQAADAIGDAANAYYARR

SEQ ID NO: 291 - protein, 21 aa, Artificial Sequence
  Description of Artificial Sequence: Synthetic peptide
  N-term Ac
  MOD_RES (9)..(9): Alpha-Me S5-pentenyl-alanine olefin amino acid connected by an all-carbon crosslinker comprising one double bond
  MISC_FEATURE (9)..(13): Crosslink between residues
  MOD_RES (13)..(13): Alpha-Me S5-pentenyl-alanine olefin amino acid connected by an all-carbon crosslinker comprising one double bond
  C-term NH2
IWIAQALDAIGDAFNAYYARR

SEQ ID NO: 292 - protein, 21 aa, Artificial Sequence
  Description of Artificial Sequence: Synthetic peptide
  N-term Ac
  MOD_RES (9)..(9): Alpha-Me S5-pentenyl-alanine olefin amino acid connected by an all-carbon crosslinker comprising one double bond
  MISC_FEATURE (9)..(13): Crosslink between residues
  MOD_RES (13)..(13): Alpha-Me S5-pentenyl-alanine olefin amino acid connected by an all-carbon crosslinker comprising one double bond
  C-term NH2
IWIAQALRAIGRAFNAYYARR

SEQ ID NO: 293 - protein, 21 aa, Artificial Sequence
  Description of Artificial Sequence: Synthetic peptide
  N-term Ac
  MOD_RES (9)..(9): Alpha-Me S5-pentenyl-alanine olefin amino acid connected by an all-carbon crosslinker comprising one double bond
  MISC_FEATURE (9)..(13): Crosslink between residues
  MOD_RES (13)..(13): Alpha-Me S5-pentenyl-alanine olefin amino acid connected by an all-carbon crosslinker comprising one double bond
  C-term NH2
IWIAQAARAIGDAANAYYARR

SEQ ID NO: 294 - protein, 21 aa, Artificial Sequence
  Description of Artificial Sequence: Synthetic peptide
  N-term Ac
  MOD_RES (9)..(9): Alpha-Me S5-pentenyl-alanine olefin amino acid connected by an all-carbon crosslinker comprising one double bond
  MISC_FEATURE (9)..(13): Crosslink between residues
  MOD_RES (13)..(13): Alpha-Me S5-pentenyl-alanine olefin amino acid connected by an all-carbon crosslinker comprising one double bond
  C-term NH2
IWIAQAADAIGRAANAYYARR

SEQ ID NO: 295 - protein, 21 aa, Artificial Sequence
  Description of Artificial Sequence: Synthetic peptide
  N-term Ac
  MOD_RES (9)..(9): Alpha-Me S5-pentenyl-alanine olefin amino acid connected by an all-carbon crosslinker comprising one double bond
  MISC_FEATURE (9)..(13): Crosslink between residues
  MOD_RES (13)..(13): Alpha-Me S5-pentenyl-alanine olefin amino acid connected by an all-carbon crosslinker comprising one double bond
  C-term NH2
IWIAQALDAIGRAFNAYYARR

SEQ ID NO: 296 - protein, 21 aa, Artificial Sequence
  Description of Artificial Sequence: Synthetic peptide
  N-term Ac
  C-term NH2
IWIAQALRRIGDEFNAYYARR

SEQ ID NO: 297 - protein, 21 aa, Artificial Sequence
  Description of Artificial Sequence: Synthetic peptide
  N-term Ac
  MOD_RES (9)..(9): Alpha-Me S5-pentenyl-alanine olefin amino acid connected by an all-carbon crosslinker comprising one double bond
  MISC_FEATURE (9)..(13): Crosslink between residues
  MOD_RES (13)..(13): Alpha-Me S5-pentenyl-alanine olefin amino acid connected by an all-carbon crosslinker comprising one double bond
  C-term NH2
IWIAQALRAIGNAFNAYYARR

SEQ ID NO: 298 - protein, 21 aa, Artificial Sequence
  Description of Artificial Sequence: Synthetic peptide
  N-term Ac
  MOD_RES (9)..(9): Alpha-Me S5-pentenyl-alanine olefin amino acid connected by an all-carbon crosslinker comprising one double bond
  MISC_FEATURE (9)..(13): Crosslink between residues
  MOD_RES (12)..(12): Norleucine
  MOD_RES (13)..(13): Alpha-Me S5-pentenyl-alanine olefin amino acid connected by an all-carbon crosslinker comprising one double bond
  C-term NH2
IWIAQALRAIGLAFNAYYARR

SEQ ID NO: 299 - protein, 21 aa, Artificial Sequence
  Description of Artificial Sequence: Synthetic peptide
  N-term Ac
  MOD_RES (9)..(9): Alpha-Me S5-pentenyl-alanine olefin amino acid connected by an all-carbon crosslinker comprising one double bond
  MISC_FEATURE (9)..(13): Crosslink between residues
  MOD_RES (13)..(13): Alpha-Me S5-pentenyl-alanine olefin amino acid connected by an all-carbon crosslinker comprising one double bond
  C-term NH2
IWIAQALRAIGAAFNAFYARR

SEQ ID NO: 300 - protein, 21 aa, Artificial Sequence
  Description of Artificial Sequence: Synthetic peptide
  N-term Ac
  MOD_RES (9)..(9): Alpha-Me S5-pentenyl-alanine olefin amino acid connected by an all-carbon crosslinker comprising one double bond
  MISC_FEATURE (9)..(13): Crosslink between residues
  MOD_RES (13)..(13): Alpha-Me S5-pentenyl-alanine olefin amino acid connected by an all-carbon crosslinker comprising one double bond
  C-term NH2
IWIAQALRAIGNAFNAFYARR

SEQ ID NO: 301 - protein, 21 aa, Artificial Sequence
  Description of Artificial Sequence: Synthetic peptide
  N-term Ac
  MOD_RES (9)..(9): Alpha-Me S5-pentenyl-alanine olefin amino acid connected by an all-carbon crosslinker comprising one double bond
  MISC_FEATURE (9)..(13): Crosslink between residues
  MOD_RES (12)..(12): Norleucine
  MOD_RES (13)..(13): Alpha-Me S5-pentenyl-alanine olefin amino acid connected by an all-carbon crosslinker comprising one double bond
  C-term NH2
IWIAQALRAIGLAFNAFYARR

SEQ ID NO: 302 - protein, 21 aa, Artificial Sequence
  Description of Artificial Sequence: Synthetic peptide
  N-term Ac
  MOD_RES (9)..(9): Alpha-Me S5-pentenyl-alanine olefin amino acid connected by an all-carbon crosslinker comprising one double bond
  MISC_FEATURE (9)..(13): Crosslink between residues
  MOD_RES (13)..(13): Alpha-Me S5-pentenyl-alanine olefin amino acid connected by an all-carbon crosslinker comprising one double bond
  C-term NH2
RWIAQAFRAIGDAFNAFYARR

SEQ ID NO: 303 - protein, 21 aa, Artificial Sequence
  Description of Artificial Sequence: Synthetic peptide
  N-term Ac
  MOD_RES (9)..(9): Alpha-Me S5-pentenyl-alanine olefin amino acid connected by an all-carbon crosslinker comprising one double bond
  MISC_FEATURE (9)..(13): Crosslink between residues
  MOD_RES (13)..(13): Alpha-Me S5-pentenyl-alanine olefin amino acid connected by an all-carbon crosslinker comprising one double bond
  C-term NH2
IWIAQAFRAIGDAFNAFYARR

SEQ ID NO: 304 - protein, 21 aa, Artificial Sequence
  Description of Artificial Sequence: Synthetic peptide
  N-term Ac
  MOD_RES (9)..(9): Alpha-Me S5-pentenyl-alanine olefin amino acid connected by an all-carbon crosslinker comprising one double bond
  MISC_FEATURE (9)..(13): Crosslink between residues
  MOD_RES (13)..(13): Alpha-Me S5-pentenyl-alanine olefin amino acid connected by an all-carbon crosslinker comprising one double bond
  C-term NH2
IWIAQAFRAIGNAFNAYYARR

SEQ ID NO: 305 - protein, 21 aa, Artificial Sequence
  Description of Artificial Sequence: Synthetic peptide
  N-term Ac
  MOD_RES (9)..(9): Alpha-Me S5-pentenyl-alanine olefin amino acid connected by an all-carbon crosslinker comprising one double bond
  MISC_FEATURE (9)..(13): Crosslink between residues
  MOD_RES (13)..(13): Alpha-Me S5-pentenyl-alanine olefin amino acid connected by an all-carbon crosslinker comprising one double bond
  C-term NH2
IWIAQAFRAIGNAFNAFYARR

SEQ ID NO: 306 - protein, 21 aa, Artificial Sequence
  Description of Artificial Sequence: Synthetic peptide
  N-term Ac
  MOD_RES (9)..(9): Alpha-Me S5-pentenyl-alanine olefin amino acid connected by an all-carbon crosslinker comprising one double bond
  MISC_FEATURE (9)..(12): Crosslink between residues
  MOD_RES (12)..(12): Alpha-Me S5-pentenyl-alanine olefin amino acid connected by an all-carbon crosslinker comprising one double bond
  C-term NH2
IWIAQALRAIGAEFNAYYARR

SEQ ID NO: 307 - protein, 21 aa, Artificial Sequence
  Description of Artificial Sequence: Synthetic peptide
  N-term Ac
  MOD_RES (10)..(10): Alpha-Me S5-pentenyl-alanine olefin amino acid connected by an all-carbon crosslinker comprising one double bond
  MISC_FEATURE (10)..(13): Crosslink between residues
  MOD_RES (13)..(13): Alpha-Me S5-pentenyl-alanine olefin amino acid connected by an all-carbon crosslinker comprising one double bond
  C-term NH2
IWIAQALRRAGDAFNAYYARR

SEQ ID NO: 308 - protein, 21 aa, Artificial Sequence
  Description of Artificial Sequence: Synthetic peptide
  N-term Ac
  MOD_RES (9)..(9): 2-aminoisobutyric acid
  MOD_RES (12)..(12): Alpha-Me-Asp
  C-term NH2
IWIAQALRXIGDEFNAYYARR

SEQ ID NO: 309 - protein, 21 aa, Artificial Sequence
  Description of Artificial Sequence: Synthetic peptide
  N-term Ac
  MOD_RES (9)..(9): Alpha-H S5-pentenyl-alanine olefin amino acid connected by an all-carbon crosslinker comprising one double bond
  MISC_FEATURE (9)..(13): Crosslink between residues
  MOD_RES (13)..(13): Alpha-H S5-pentenyl-alanine olefin amino acid connected by an all-carbon crosslinker comprising one double bond
  C-term NH2
IWIAQELRAIGDAFNAYYARR

SEQ ID NO: 310 - protein, 21 aa, Artificial Sequence
  Description of Artificial Sequence: Synthetic peptide
  N-term Ac
  MOD_RES (9)..(9): Alpha-Me S5-pentenyl-alanine olefin amino acid connected by an all-carbon crosslinker comprising one double bond
  MISC_FEATURE (9)..(13): Crosslink between residues
  MOD_RES (13)..(13): Alpha-H S5-pentenyl-alanine olefin amino acid connected by an all-carbon crosslinker comprising one double bond
  C-term NH2
IWIAQELRAIGDAFNAYYARR

SEQ ID NO: 311 - protein, 21 aa, Artificial Sequence
  Description of Artificial Sequence: Synthetic peptide
  N-term Ac
  MOD_RES (9)..(9): Alpha-H S5-pentenyl-alanine olefin amino acid connected by an all-carbon crosslinker comprising one double bond
  MISC_FEATURE (9)..(13): Crosslink between residues
  MOD_RES (13)..(13): Alpha-Me S5-pentenyl-alanine olefin amino acid connected by an all-carbon crosslinker comprising one double bond
  C-term NH2
IWIAQELRAIGDAFNAYYARR

SEQ ID NO: 312 - protein, 21 aa, Artificial Sequence
  Description of Artificial Sequence: Synthetic peptide
  N-term Ac
  MOD_RES (9)..(9): Alpha-Me S5-pentenyl-alanine olefin amino acid connected by an all-carbon crosslinker comprising one double bond
  MISC_FEATURE (9)..(13): Crosslink between residues
  MOD_RES (13)..(13): Alpha-Me S5-pentenyl-alanine olefin amino acid connected by an all-carbon crosslinker comprising one double bond
  C-term NHiBu
IWIAQALRAIGDAFNAYYARR

SEQ ID NO: 313 - protein, 21 aa, Artificial Sequence
  Description of Artificial Sequence: Synthetic peptide
  N-term Chx
  MOD_RES (9)..(9): Alpha-Me S5-pentenyl-alanine olefin amino acid connected by an all-carbon crosslinker comprising one double bond
  MISC_FEATURE (9)..(13): Crosslink between residues
  MOD_RES (13)..(13): Alpha-Me S5-pentenyl-alanine olefin amino acid connected by an all-carbon crosslinker comprising one double bond
  C-term NHiBu
IWIAQALRAIGDAFNAYYARR

SEQ ID NO: 314 - protein, 21 aa, Artificial Sequence
  Description of Artificial Sequence: Synthetic peptide
  N-term Chx-U
  MOD_RES (9)..(9): Alpha-Me S5-pentenyl-alanine olefin amino acid connected by an all-carbon crosslinker comprising one double bond
  MISC_FEATURE (9)..(13): Crosslink between residues
  MOD_RES (13)..(13): Alpha-Me S5-pentenyl-alanine olefin amino acid connected by an all-carbon crosslinker comprising one double bond
  C-term NHiBu
IWIAQALRAIGDAFNAYYARR

SEQ ID NO: 315 - protein, 22 aa, Artificial Sequence
  Description of Artificial Sequence: Synthetic peptide
  N-term FITC
  MOD_RES (1)..(1): 6-aminohexanoic acid
  MOD_RES (10)..(10): Alpha-Me S5-pentenyl-alanine olefin amino acid connected by an all-carbon crosslinker comprising one double bond
  MISC_FEATURE (10)..(14): Crosslink between residues
  MOD_RES (14)..(14): Alpha-Me S5-pentenyl-alanine olefin amino acid connected by an all-carbon crosslinker comprising one double bond
  MOD_RES (17)..(17): 2-aminoisobutyric acid
  C-term NH2
XIWIAQALRAIGDAFNXYYARR

SEQ ID NO: 316 - protein, 22 aa, Artificial Sequence
  Description of Artificial Sequence: Synthetic peptide
  N-term FITC
  MOD_RES (1)..(1): 6-aminohexanoic acid
  MOD_RES (10)..(10): Alpha-Me S5-pentenyl-alanine olefin amino acid connected by an all-carbon crosslinker comprising one double bond
  MISC_FEATURE (10)..(14): Crosslink between residues
  MOD_RES (14)..(14): Alpha-Me S5-pentenyl-alanine olefin amino acid connected by an all-carbon crosslinker comprising one double bond
  C-term NH2
XIWIAQALRAIGDAFNAFYARR

SEQ ID NO: 317 - protein, 22 aa, Artificial Sequence
  Description of Artificial Sequence: Synthetic peptide
  N-term FITC
  MOD_RES (1)..(1): 6-aminohexanoic acid
  MOD_RES (10)..(10): Alpha-Me S5-pentenyl-alanine olefin amino acid connected by an all-carbon crosslinker comprising one double bond
  MISC_FEATURE (10)..(14): Crosslink between residues
  MOD_RES (14)..(14): Alpha-Me S5-pentenyl-alanine olefin amino acid connected by an all-carbon crosslinker comprising one double bond
  C-term NH2
XRWIAQALRAIGDAFNAFYARR

SEQ ID NO: 318 - protein, 22 aa, Artificial Sequence
  Description of Artificial Sequence: Synthetic peptide
  N-term FITC
  MOD_RES (1)..(1): 6-aminohexanoic acid
  MOD_RES (10)..(10): Alpha-Me S5-pentenyl-alanine olefin amino acid connected by an all-carbon crosslinker comprising one double bond
  MISC_FEATURE (10)..(14): Crosslink between residues
  MOD_RES (14)..(14): Alpha-Me S5-pentenyl-alanine olefin amino acid connected by an all-carbon crosslinker comprising one double bond
  C-term NH2
XRWIAQALRAIGNAFNAYYARR

SEQ ID NO: 319 - protein, 22 aa, Artificial Sequence
  Description of Artificial Sequence: Synthetic peptide
  N-term FITC
  MOD_RES (1)..(1): 6-aminohexanoic acid
  MOD_RES (10)..(10): Alpha-Me S5-pentenyl-alanine olefin amino acid connected by an all-carbon crosslinker comprising one double bond
  MISC_FEATURE (10)..(14): Crosslink between residues
  MOD_RES (13)..(13): Norleucine
  MOD_RES (14)..(14): Alpha-Me S5-pentenyl-alanine olefin amino acid connected by an all-carbon crosslinker comprising one double bond
  C-term NH2
XRWIAQALRAIGLAFNAYYARR

SEQ ID NO: 320 - protein, 22 aa, Artificial Sequence
  Description of Artificial Sequence: Synthetic peptide
  N-term FITC
  MOD_RES (1)..(1): 6-aminohexanoic acid
  MOD_RES (10)..(10): Alpha-Me S5-pentenyl-alanine olefin amino acid connected by an all-carbon crosslinker comprising one double bond
  MISC_FEATURE (10)..(14): Crosslink between residues
  MOD_RES (14)..(14): Alpha-Me S5-pentenyl-alanine olefin amino acid connected by an all-carbon crosslinker comprising one double bond
  C-term NH2
XIWIAQALRAIGNAFNAYYARR

SEQ ID NO: 321 - protein, 22 aa, Artificial Sequence
  Description of Artificial Sequence: Synthetic peptide
  N-term FITC
  MOD_RES (1)..(1): 6-aminohexanoic acid
  MOD_RES (10)..(10): Alpha-Me S5-pentenyl-alanine olefin amino acid connected by an all-carbon crosslinker comprising one double bond
  MISC_FEATURE (10)..(14): Crosslink between residues
  MOD_RES (13)..(13): Norleucine
  MOD_RES (14)..(14): Alpha-Me S5-pentenyl-alanine olefin amino acid connected by an all-carbon crosslinker comprising one double bond
  C-term NH2
XIWIAQALRAIGLAFNAYYARR

SEQ ID NO: 322 - protein, 21 aa, Artificial Sequence
  Description of Artificial Sequence: Synthetic peptide
  N-term Ac
  MOD_RES (9)..(9): Lys with side-chain is involved in lactam formation
  MOD_RES (13)..(13): Glu with side-chain is involved in lactam formation
  C-term NH2
IWIAQELRKIGDEFNAYYARR

SEQ ID NO: 323 - protein, 21 aa, Artificial Sequence
  Description of Artificial Sequence: Synthetic peptide
  N-term Ac
  MOD_RES (9)..(9): Glu with side-chain is involved in lactam formation
  MOD_RES (13)..(13): Lys with side-chain is involved in lactam formation
  C-term NH2
IWIAQELREIGDKFNAYYARR

SEQ ID NO: 324 - protein, 21 aa, Artificial Sequence
  Description of Artificial Sequence: Synthetic peptide
  N-term Ac
  MOD_RES (9)..(9): Lys with side-chain is involved in lactam formation
  MOD_RES (11)..(11): 2-aminoisobutyric acid
  MOD_RES (13)..(13): Glu with side-chain is involved in lactam formation
  C-term NH2
IWIAQELRKIXDEFNAYYARR

SEQ ID NO: 325 - protein, 21 aa, Artificial Sequence
  Description of Artificial Sequence: Synthetic peptide
  N-term Ac
  MOD_RES (9)..(9): Glu with side-chain is involved in lactam formation
  MOD_RES (11)..(11): 2-aminoisobutyric acid
  MOD_RES (13)..(13): Lys with side-chain is involved in lactam formation
  C-term NH2
IWIAQELREIXDKFNAYYARR

SEQ ID NO: 326 - protein, 21 aa, Artificial Sequence
  Description of Artificial Sequence: Synthetic peptide
  N-term Ac
  MOD_RES (9)..(9): O-allyl serine
  MISC_FEATURE (9)..(13): Crosslink between residues
  MOD_RES (13)..(13): O-allyl serine
  C-term NH2
IWIAQELRSIGDSFNAYYARR

SEQ ID NO: 327 - protein, 21 aa, Artificial Sequence
  Description of Artificial Sequence: Synthetic peptide
  N-term Ac
  MOD_RES (9)..(9): O-allyl serine
  MISC_FEATURE (9)..(13): Crosslink between residues
  MOD_RES (11)..(11): 2-aminoisobutyric acid
  MOD_RES (13)..(13): O-allyl serine
  C-term NH2
IWIAQELRSIXDSFNAYYARR

SEQ ID NO: 328 - protein, 21 aa, Artificial Sequence
  Description of Artificial Sequence: Synthetic peptide
  N-term Ac
  MOD_RES (9)..(9): Alpha-methylated O-allyl serine
  MISC_FEATURE (9)..(13): Crosslink between residues
  MOD_RES (13)..(13): Alpha-methylated O-allyl serine
  C-term NH2
IWIAQELRSIGDSFNAYYARR

SEQ ID NO: 329 - protein, 21 aa, Artificial Sequence
  Description of Artificial Sequence: Synthetic peptide
  N-term Ac
  MOD_RES (2)..(2): Alpha-Me-Trp
  MOD_RES (9)..(9): Alpha-Me S5-pentenyl-alanine olefin amino acid connected by an all-carbon crosslinker comprising one double bond
  MISC_FEATURE (9)..(13): Crosslink between residues
  MOD_RES (13)..(13): Alpha-Me S5-pentenyl-alanine olefin amino acid connected by an all-carbon crosslinker comprising one double bond
  C-term NH2
IWIAQELRAIGDAFNAYYARR

SEQ ID NO: 330 - protein, 21 aa, Artificial Sequence
  Description of Artificial Sequence: Synthetic peptide
  N-term Ac
  MOD_RES (9)..(9): Alpha-Me R5-pentenyl-alanine olefin amino acid connected by an all-carbon crosslinker comprising one double bond
  MISC_FEATURE (9)..(13): Crosslink between residues
  MOD_RES (13)..(13): Alpha-Me R5-pentenyl-alanine olefin amino acid connected by an all-carbon crosslinker comprising one double bond
  C-term NH2
IWIAQELRAIGDAFNAYYARR

SEQ ID NO: 331 - protein, 21 aa, Artificial Sequence
  Description of Artificial Sequence: Synthetic peptide
  N-term Ac
  MOD_RES (5)..(5): Alpha-Me R5-pentenyl-alanine olefin amino acid connected by an all-carbon crosslinker comprising one double bond
  MISC_FEATURE (5)..(9): Crosslink between residues
  MOD_RES (9)..(9): Alpha-Me R5-pentenyl-alanine olefin amino acid connected by an all-carbon crosslinker comprising one double bond
  C-term NH2
IWIAAELRAIGDEFNAYYARR

SEQ ID NO: 332 - protein, 21 aa, Artificial Sequence
  Description of Artificial Sequence: Synthetic peptide
  N-term Ac
  MOD_RES (5)..(5): Alpha-Me S5-pentenyl-alanine olefin amino acid connected by an all-carbon crosslinker comprising one double bond
  MISC_FEATURE (5)..(9): Crosslink between residues
  MOD_RES (9)..(9): Alpha-Me S5-pentenyl-alanine olefin amino acid connected by an all-carbon crosslinker comprising one double bond
  C-term NH2
IWIAAELRAIGDEFNAYYARR

SEQ ID NO: 333 - protein, 21 aa, Artificial Sequence
  Description of Artificial Sequence: Synthetic peptide
  N-term Ac
  MOD_RES (6)..(6): Alpha-Me R8-octenyl-alanine olefin amino acid connected by an all-carbon crosslinker comprising one double bond
  MISC_FEATURE (6)..(13): Crosslink between residues
  MOD_RES (13)..(13): Alpha-Me S5-pentenyl-alanine olefin amino acid connected by an all-carbon crosslinker comprising one double bond
  C-term NH2
IWIAQALRRIGDAFNAYYARR

SEQ ID NO: 334 - protein, 21 aa, Artificial Sequence
  Description of Artificial Sequence: Synthetic peptide
  N-term Ac
  MOD_RES (2)..(2): Alpha-Me R8-octenyl-alanine olefin amino acid connected by an all-carbon crosslinker comprising one double bond
  MISC_FEATURE (2)..(9): Crosslink between residues
  MOD_RES (9)..(9): Alpha-Me S5-pentenyl-alanine olefin amino acid connected by an all-carbon crosslinker comprising one double bond
  C-term NH2
IAIAQELRAIGDEFNAYYARR

SEQ ID NO: 335 - protein, 19 aa, Artificial Sequence
  Description of Artificial Sequence: Synthetic peptide
  N-term heptenoic acid crosslinked with position 4 via an all-carbon crosslinker comprising one double bond
  MOD_RES (4)..(4): Alpha-Me S5-pentenyl-alanine olefin amino acid connected by an all-carbon crosslinker comprising one double bond
  C-term NH2
IAQALRRIGDEFNAYYARR

SEQ ID NO: 336 - protein, 19 aa, Artificial Sequence
  Description of Artificial Sequence: Synthetic peptide
  N-term heptenoic acid crosslinked with position 4 via an all-carbon crosslinker comprising one double bond
  MOD_RES (4)..(4): Alpha-Me S5-pentenyl-alanine olefin amino acid connected by an all-carbon crosslinker comprising one double bond
  MOD_RES (7)..(7): Alpha-Me S5-pentenyl-alanine olefin amino acid connected by an all-carbon crosslinker comprising one double bond
  MISC_FEATURE (7)..(11): Crosslink between residues
  MOD_RES (11)..(11): Alpha-Me S5-pentenyl-alanine olefin amino acid connected by an all-carbon crosslinker comprising one double bond
  C-term NH2
IAQALRAIGDAFNAYYARR

SEQ ID NO: 337 - protein, 20 aa, Artificial Sequence
  Description of Artificial Sequence: Synthetic peptide
  N-term heptenoic acid crosslinked with position 4 via an all-carbon crosslinker comprising one double bond
  MOD_RES (4)..(4): Alpha-Me S5-pentenyl-alanine olefin amino acid connected by an all-carbon crosslinker comprising one double bond
  C-term NH2
WIAAELRRIGDEFNAYYARR

SEQ ID NO: 338 - protein, 20 aa, Artificial Sequence
  Description of Artificial Sequence: Synthetic peptide
  N-term heptenoic acid crosslinked with position 4 via an all-carbon crosslinker comprising one double bond
  MOD_RES (4)..(4): Alpha-Me S5-pentenyl-alanine olefin amino acid connected by an all-carbon crosslinker comprising one double bond
  MOD_RES (8)..(8): Alpha-Me S5-pentenyl-alanine olefin amino acid connected by an all-carbon crosslinker comprising one double bond
  MISC_FEATURE (8)..(12): Crosslink between residues
  MOD_RES (12)..(12): Alpha-Me S5-pentenyl-alanine olefin amino acid connected by an all-carbon crosslinker comprising one double bond
  C-term NH2
WIAAELRAIGDAFNAYYARR

SEQ ID NO: 339 - protein, 21 aa, Artificial Sequence
  Description of Artificial Sequence: Synthetic peptide
  N-term Ac
  MOD_RES (2)..(2): Alpha-Me S5-pentenyl-alanine olefin amino acid connected by an all-carbon crosslinker comprising one double bond
  MISC_FEATURE (2)..(6): Crosslink between residues
  MOD_RES (6)..(6): Alpha-Me S5-pentenyl-alanine olefin amino acid connected by an all-carbon crosslinker comprising one double bond
  C-term NH2
IAIAQALRRIGDEFNAYYARR

SEQ ID NO: 340 - protein, 21 aa, Artificial Sequence
  Description of Artificial Sequence: Synthetic peptide
  N-term Ac
  MOD_RES (2)..(2): Alpha-Me S5-pentenyl-alanine olefin amino acid connected by an all-carbon crosslinker comprising one double bond
  MISC_FEATURE (2)..(6): Crosslink between residues
  MOD_RES (6)..(6): Alpha-Me S5-pentenyl-alanine olefin amino acid connected by an all-carbon crosslinker comprising one double bond
  MOD_RES (9)..(9): Alpha-Me S5-pentenyl-alanine olefin amino acid connected by an all-carbon crosslinker comprising one double bond
  MISC_FEATURE (9)..(13): Crosslink between residues
  MOD_RES (13)..(13): Alpha-Me S5-pentenyl-alanine olefin amino acid connected by an all-carbon crosslinker comprising one double bond
  C-term NH2
IAIAQALRAIGDAFNAYYARR

SEQ ID NO: 341 - protein, 21 aa, Artificial Sequence
  Description of Artificial Sequence: Synthetic peptide
  N-term Ac
  MOD_RES (9)..(9): Alpha-Me S5-pentenyl-alanine olefin amino acid connected by an all-carbon crosslinker comprising one double bond
  MISC_FEATURE (9)..(13): Crosslink between residues
  MOD_RES (13)..(13): Alpha-Me S5-pentenyl-alanine olefin amino acid connected by an all-carbon crosslinker comprising one double bond
  C-term NH2
IWIAQALEAIGDAFNAYYARR

SEQ ID NO: 342 - protein, 21 aa, Artificial Sequence
  Description of Artificial Sequence: Synthetic peptide
  N-term Ac
  MOD_RES (9)..(9): Alpha-Me S5-pentenyl-alanine olefin amino acid connected by an all-carbon crosslinker comprising one double bond
  MISC_FEATURE (9)..(13): Crosslink between residues
  MOD_RES (13)..(13): Alpha-Me S5-pentenyl-alanine olefin amino acid connected by an all-carbon crosslinker comprising one double bond
  C-term NH2
IWIAQALRAIGRAANAYYARR

SEQ ID NO: 343 - protein, 21 aa, Artificial Sequence
  Description of Artificial Sequence: Synthetic peptide
  N-term Ac
  MOD_RES (9)..(9): Alpha-Me S5-pentenyl-alanine olefin amino acid connected by an all-carbon crosslinker comprising one double bond
  MISC_FEATURE (9)..(13): Crosslink between residues
  MOD_RES (13)..(13): Alpha-Me S5-pentenyl-alanine olefin amino acid connected by an all-carbon crosslinker comprising one double bond
  C-term NH2
IWIAQAAEAIGRAANAYYARR

SEQ ID NO: 344 - protein, 21 aa, Artificial Sequence
  Description of Artificial Sequence: Synthetic peptide
  N-term Ac
  MOD_RES (9)..(9): Alpha-Me S5-pentenyl-alanine olefin amino acid connected by an all-carbon crosslinker comprising one double bond
  MISC_FEATURE (9)..(13): Crosslink between residues
  MOD_RES (13)..(13): Alpha-Me S5-pentenyl-alanine olefin amino acid connected by an all-carbon crosslinker comprising one double bond
  C-term NH2
IWIAQAAEAIGEAANAYYARR

SEQ ID NO: 345 - protein, 21 aa, Artificial Sequence
  Description of Artificial Sequence: Synthetic peptide
  N-term Ac
  MOD_RES (9)..(9): Alpha-Me S5-pentenyl-alanine olefin amino acid connected by an all-carbon crosslinker comprising one double bond
  MISC_FEATURE (9)..(13): Crosslink between residues
  MOD_RES (13)..(13): Alpha-Me S5-pentenyl-alanine olefin amino acid connected by an all-carbon crosslinker comprising one double bond
  C-term NH2
RWIAQALRAIGRAFNAFYARR

SEQ ID NO: 346 - protein, 21 aa, Artificial Sequence
  Description of Artificial Sequence: Synthetic peptide
  N-term Ac
  MOD_RES (9)..(9): Alpha-Me S5-pentenyl-alanine olefin amino acid connected by an all-carbon crosslinker comprising one double bond
  MISC_FEATURE (9)..(13): Crosslink between residues
  MOD_RES (13)..(13): Alpha-Me S5-pentenyl-alanine olefin amino acid connected by an all-carbon crosslinker comprising one double bond
  C-term NH2
RWIAQALEAIGDAFNAFYARR

SEQ ID NO: 347 - protein, 21 aa, Artificial Sequence
  Description of Artificial Sequence: Synthetic peptide
  N-term Ac
  MOD_RES (9)..(9): Alpha-Me S5-pentenyl-alanine olefin amino acid connected by an all-carbon crosslinker comprising one double bond
  MISC_FEATURE (9)..(13): Crosslink between residues
  MOD_RES (13)..(13): Alpha-Me S5-pentenyl-alanine olefin amino acid connected by an all-carbon crosslinker comprising one double bond
  C-term NH2
RWIAQAARAIGRAANAFYARR

SEQ ID NO: 348 - protein, 21 aa, Artificial Sequence
  Description of Artificial Sequence: Synthetic peptide
  N-term Ac
  MOD_RES (9)..(9): Alpha-Me S5-pentenyl-alanine olefin amino acid connected by an all-carbon crosslinker comprising one double bond
  MISC_FEATURE (9)..(13): Crosslink between residues
  MOD_RES (13)..(13): Alpha-Me S5-pentenyl-alanine olefin amino acid connected by an all-carbon crosslinker comprising one double bond
  C-term NH2
RWIAQAAEAIGDAANAFYARR

SEQ ID NO: 349 - protein, 21 aa, Artificial Sequence
  Description of Artificial Sequence: Synthetic peptide
  N-term Ac
  MOD_RES (9)..(9): Alpha-Me S5-pentenyl-alanine olefin amino acid connected by an all-carbon crosslinker comprising one double bond
  MISC_FEATURE (9)..(13): Crosslink between residues
  MOD_RES (13)..(13): Alpha-Me S5-pentenyl-alanine olefin amino acid connected by an all-carbon crosslinker comprising one double bond
  C-term NH2
RWIAQAADAIGDAANAFYARR

SEQ ID NO: 350 - protein, 21 aa, Artificial Sequence
  Description of Artificial Sequence: Synthetic peptide
  N-term Ac
  MOD_RES (9)..(9): Alpha-Me S5-pentenyl-alanine olefin amino acid connected by an all-carbon crosslinker comprising one double bond
  MISC_FEATURE (9)..(13): Crosslink between residues
  MOD_RES (13)..(13): Alpha-Me S5-pentenyl-alanine olefin amino acid connected by an all-carbon crosslinker comprising one double bond
  C-term NH2
RWIAQAAEAIGRAANAFYARR

SEQ ID NO: 351 - protein, 21 aa, Artificial Sequence
  Description of Artificial Sequence: Synthetic peptide
  N-term Ac
  MOD_RES (9)..(9): Alpha-Me S5-pentenyl-alanine olefin amino acid connected by an all-carbon crosslinker comprising one double bond
  MISC_FEATURE (9)..(13): Crosslink between residues
  MOD_RES (13)..(13): Alpha-Me S5-pentenyl-alanine olefin amino acid connected by an all-carbon crosslinker comprising one double bond
  C-term NH2
RWIAQAARAIGDAANAFYARR

SEQ ID NO: 352 - protein, 21 aa, Artificial Sequence
  Description of Artificial Sequence: Synthetic peptide
  N-term Ac
  MOD_RES (9)..(9): Alpha-Me S5-pentenyl-alanine olefin amino acid connected by an all-carbon crosslinker comprising one double bond
  MISC_FEATURE (9)..(13): Crosslink between residues
  MOD_RES (13)..(13): Alpha-Me S5-pentenyl-alanine olefin amino acid connected by an all-carbon crosslinker comprising one double bond
  C-term NH2
RWIAQALRADIGAFNAFYARR

SEQ ID NO: 353 - protein, 21 aa, Artificial Sequence
  Description of Artificial Sequence: Synthetic peptide
  N-term Ac
  MOD_RES (9)..(9): Alpha-Me S5-pentenyl-alanine olefin amino acid connected by an all-carbon crosslinker comprising one double bond
  MISC_FEATURE (9)..(13): Crosslink between residues
  MOD_RES (13)..(13): Alpha-Me S5-pentenyl-alanine olefin amino acid connected by an all-carbon crosslinker comprising one double bond
  C-term NH2
RWIAQALRAIGNAANAYYARR

SEQ ID NO: 354 - protein, 21 aa, Artificial Sequence
  Description of Artificial Sequence: Synthetic peptide
  N-term Ac
  MOD_RES (9)..(9): Alpha-Me S5-pentenyl-alanine olefin amino acid connected by an all-carbon crosslinker comprising one double bond
  MISC_FEATURE (9)..(13): Crosslink between residues
  MOD_RES (13)..(13): Alpha-Me S5-pentenyl-alanine olefin amino acid connected by an all-carbon crosslinker comprising one double bond
  C-term NH2
RWIAQAARAIGNAANAYYARR

SEQ ID NO: 355 - protein, 21 aa, Artificial Sequence
  Description of Artificial Sequence: Synthetic peptide
  N-term Ac
  MOD_RES (9)..(9): Alpha-Me S5-pentenyl-alanine olefin amino acid connected by an all-carbon crosslinker comprising one double bond
  MISC_FEATURE (9)..(13): Crosslink between residues
  MOD_RES (13)..(13): Alpha-Me S5-pentenyl-alanine olefin amino acid connected by an all-carbon crosslinker comprising one double bond
  C-term NH2
RWIAQAAEAIGNAANAYYARR

SEQ ID NO: 356 - protein, 21 aa, Artificial Sequence
  Description of Artificial Sequence: Synthetic peptide
  N-term Ac
  MOD_RES (9)..(9): Alpha-Me S5-pentenyl-alanine olefin amino acid connected by an all-carbon crosslinker comprising one double bond
  MISC_FEATURE (9)..(13): Crosslink between residues
  MOD_RES (13)..(13): Alpha-Me S5-pentenyl-alanine olefin amino acid connected by an all-carbon crosslinker comprising one double bond
  C-term NH2
RWIAQAAEAIGNAANAYYARR

SEQ ID NO: 357 - protein, 21 aa, Artificial Sequence
  Description of Artificial Sequence: Synthetic peptide
  N-term Ac
  MOD_RES (9)..(9): Alpha-Me S5-pentenyl-alanine olefin amino acid connected by an all-carbon crosslinker comprising one double bond
  MISC_FEATURE (9)..(13): Crosslink between residues
  MOD_RES (13)..(13): Alpha-Me S5-pentenyl-alanine olefin amino acid connected by an all-carbon crosslinker comprising one double bond
  C-term NH2
RWIAQAAEANIGAANAYYARR

SEQ ID NO: 358 - protein, 21 aa, Artificial Sequence
  Description of Artificial Sequence: Synthetic peptide
  N-term Ac
  MOD_RES (9)..(9): Alpha-Me S5-pentenyl-alanine olefin amino acid connected by an all-carbon crosslinker comprising one double bond
  MISC_FEATURE (9)..(13): Crosslink between residues
  MOD_RES (13)..(13): Alpha-Me S5-pentenyl-alanine olefin amino acid connected by an all-carbon crosslinker comprising one double bond
  C-term NH2
RWIAQAARANIGAANAYYARR

SEQ ID NO: 359 - protein, 21 aa, Artificial Sequence
  Description of Artificial Sequence: Synthetic peptide
  N-term Ac
  MOD_RES (9)..(9): Alpha-Me S5-pentenyl-alanine olefin amino acid connected by an all-carbon crosslinker comprising one double bond
  MISC_FEATURE (9)..(13): Crosslink between residues
  MOD_RES (13)..(13): Alpha-Me S5-pentenyl-alanine olefin amino acid connected by an all-carbon crosslinker comprising one double bond
  C-term NH2
IWIAQALRAIGNAANAYYARR

SEQ ID NO: 360 - protein, 21 aa, Artificial Sequence
  Description of Artificial Sequence: Synthetic peptide
  N-term Ac
  MOD_RES (9)..(9): Alpha-Me S5-pentenyl-alanine olefin amino acid connected by an all-carbon crosslinker comprising one double bond
  MISC_FEATURE (9)..(13): Crosslink between residues
  MOD_RES (13)..(13): Alpha-Me S5-pentenyl-alanine olefin amino acid connected by an all-carbon crosslinker comprising one double bond
  C-term NH2
IWIAQAARAIGNAANAYYARR

SEQ ID NO: 361 - protein, 21 aa, Artificial Sequence
  Description of Artificial Sequence: Synthetic peptide
  N-term Ac
  MOD_RES (9)..(9): Alpha-Me S5-pentenyl-alanine olefin amino acid connected by an all-carbon crosslinker comprising one double bond
  MISC_FEATURE (9)..(13): Crosslink between residues
  MOD_RES (13)..(13): Alpha-Me S5-pentenyl-alanine olefin amino acid connected by an all-carbon crosslinker comprising one double bond
  C-term NH2
IWIAQAAEAIGNAANAYYARR

SEQ ID NO: 362 - protein, 21 aa, Artificial Sequence
  Description of Artificial Sequence: Synthetic peptide
  N-term Ac
  MOD_RES (9)..(9): Alpha-Me S5-pentenyl-alanine olefin amino acid connected by an all-carbon crosslinker comprising one double bond
  MISC_FEATURE (9)..(13): Crosslink between residues
  MOD_RES (13)..(13): Alpha-Me S5-pentenyl-alanine olefin amino acid connected by an all-carbon crosslinker comprising one double bond
  C-term NH2
IWIAQAAEAIGNAANAYYARR

SEQ ID NO: 363 - protein, 21 aa, Artificial Sequence
  Description of Artificial Sequence: Synthetic peptide
  N-term Ac
  MOD_RES (9)..(9): Alpha-Me S5-pentenyl-alanine olefin amino acid connected by an all-carbon crosslinker comprising one double bond
  MISC_FEATURE (9)..(13): Crosslink between residues
  MOD_RES (13)..(13): Alpha-Me S5-pentenyl-alanine olefin amino acid connected by an all-carbon crosslinker comprising one double bond
  C-term NH2
IWIAQAAEANIGAANAYYARR

SEQ ID NO: 364 - protein, 21 aa, Artificial Sequence
  Description of Artificial Sequence: Synthetic peptide
  N-term Ac
  MOD_RES (9)..(9): Alpha-Me S5-pentenyl-alanine olefin amino acid connected by an all-carbon crosslinker comprising one double bond
  MISC_FEATURE (9)..(13): Crosslink between residues
  MOD_RES (13)..(13): Alpha-Me S5-pentenyl-alanine olefin amino acid connected by an all-carbon crosslinker comprising one double bond
  C-term NH2
IWIAQAARANIGAANAYYARR

SEQ ID NO: 365 - protein, 21 aa, Artificial Sequence
  Description of Artificial Sequence: Synthetic peptide
  N-term Ac
  C-term NH2
RWIAQALRRIGNEFNAYYARR

SEQ ID NO: 366 - protein, 21 aa, Artificial Sequence
  Description of Artificial Sequence: Synthetic peptide
  N-term Ac
  C-term NH2
IWIAQALRRIGNEFNAYYARR

SEQ ID NO: 367 - protein, 21 aa, Artificial Sequence
  Description of Artificial Sequence: Synthetic peptide
  N-term Ac
  MOD_RES (9)..(9): Alpha-Me S5-pentenyl-alanine olefin amino acid connected by an all-carbon crosslinker comprising one double bond
  MISC_FEATURE (9)..(13): Crosslink between residues
  MOD_RES (13)..(13): Alpha-Me S5-pentenyl-alanine olefin amino acid connected by an all-carbon crosslinker comprising one double bond
  C-term NH2
RWIAQALRAIENAFNAYYARR

SEQ ID NO: 368 - protein, 21 aa, Artificial Sequence
  Description of Artificial Sequence: Synthetic peptide
  N-term Ac
  MOD_RES (9)..(9): Alpha-Me S5-pentenyl-alanine olefin amino acid connected by an all-carbon crosslinker comprising one double bond
  MISC_FEATURE (9)..(13): Crosslink between residues
  MOD_RES (13)..(13): Alpha-Me S5-pentenyl-alanine olefin amino acid connected by an all-carbon crosslinker comprising one double bond
  C-term NH2
RWIAQALRAIEDAFNAFYARR

SEQ ID NO: 369 - protein, 21 aa, Artificial Sequence
  Description of Artificial Sequence: Synthetic peptide
  N-term Ac
  MOD_RES (9)..(9): Alpha-Me S5-pentenyl-alanine olefin amino acid connected by an all-carbon crosslinker comprising one double bond
  MISC_FEATURE (9)..(13): Crosslink between residues
  MOD_RES (13)..(13): Alpha-Me S5-pentenyl-alanine olefin amino acid connected by an all-carbon crosslinker comprising one double bond
  C-term NH2
IWIAQALRAIEDAFNAFYARR

SEQ ID NO: 370 - protein, 21 aa, Artificial Sequence
  Description of Artificial Sequence: Synthetic peptide
  N-term Ac
  MOD_RES (9)..(9): Alpha-Me S5-pentenyl-alanine olefin amino acid connected by an all-carbon crosslinker comprising one double bond
  MISC_FEATURE (9)..(13): Crosslink between residues
  MOD_RES (13)..(13): Alpha-Me S5-pentenyl-alanine olefin amino acid connected by an all-carbon crosslinker comprising one double bond
  C-term NH2
IWIAQELRAIGRAFNAYYARR

SEQ ID NO: 371 - protein, 21 aa, Artificial Sequence
  Description of Artificial Sequence: Synthetic peptide
  N-term Ac
  MOD_RES (9)..(9): Lys with side-chain is involved in lactam formation
  MOD_RES (13)..(13): Asp with side-chain is involved in lactam formation
  C-term NH2
IWIAQELRKIGDDFNAYYARR

SEQ ID NO: 372 - protein, 21 aa, Artificial Sequence
  Description of Artificial Sequence: Synthetic peptide
  N-term Ac
  MOD_RES (9)..(9): Asp with side-chain is involved in lactam formation
  MOD_RES (13)..(13): Lys with side-chain is involved in lactam formation
  C-term NH2
IWIAQELRDIGDKFNAYYARR

SEQ ID NO: 373 - protein, 22 aa, Artificial Sequence
  Description of Artificial Sequence: Synthetic peptide
  N-term FITC
  MOD_RES (1)..(1): 6-aminohexanoic acid
  C-term NH2
XRWIAQALRRIGDEFNAFYARR

SEQ ID NO: 374 - protein, 22 aa, Artificial Sequence
  Description of Artificial Sequence: Synthetic peptide
  N-term FITC
  MOD_RES (1)..(1): 6-aminohexanoic acid
  C-term NH2
XRWIAQALRRIGNEFNAYYARR

SEQ ID NO: 375 - protein, 22 aa, Artificial Sequence
  Description of Artificial Sequence: Synthetic peptide
  N-term FITC
  MOD_RES (1)..(1): 6-aminohexanoic acid
  C-term NH2
XIWIAQALRRIGNEFNAYYARR

SEQ ID NO: 376 - protein, 22 aa, Artificial Sequence
  Description of Artificial Sequence: Synthetic peptide
  N-term FITC
  MOD_RES (1)..(1): 6-aminohexanoic acid
  C-term NH2
XIWIAQELRRIGDEFNAYYARR

SEQ ID NO: 377 - protein, 21 aa, Artificial Sequence
  Description of Artificial Sequence: Synthetic peptide
  N-term Ac
  MOD_RES (9)..(9): Alpha-Me S5-pentenyl-alanine olefin amino acid not connected by any crosslinker
  MOD_RES (13)..(13): Alpha-Me S5-pentenyl-alanine olefin amino acid not connected by any crosslinker
  C-term NH2
RWIAQALRAIGNAFNAYYARR

SEQ ID NO: 378 - protein, 21 aa, Artificial Sequence
  Description of Artificial Sequence: Synthetic peptide
  N-term Ac
  MOD_RES (9)..(9): S-allyl cysteine
  MISC_FEATURE (9)..(13): Crosslink between residues
  MOD_RES (13)..(13): S-allyl cysteine
  C-term NH2
IWIAQELRCIGRCFNAYYARR

SEQ ID NO: 379 - protein, 21 aa, Artificial Sequence
  Description of Artificial Sequence: Synthetic peptide
  N-term Ac
  C-term NH2
IWIAQELRCIGRCFNAYYARR

SEQ ID NO: 380 - protein, 22 aa, Artificial Sequence
  Description of Artificial Sequence: Synthetic peptide
  N-term FITC
  MOD_RES (1)..(1): 6-aminohexanoic acid
  MOD_RES (10)..(10): Alpha-Me S5-pentenyl-alanine olefin amino acid connected by an all-carbon crosslinker comprising one double bond
  MISC_FEATURE (10)..(14): Crosslink between residues
  MOD_RES (14)..(14): Alpha-Me S5-pentenyl-alanine olefin amino acid connected by an all-carbon crosslinker comprising one double bond
  C-term NH2
XIWIAQAARADIGAANAYYARR

SEQ ID NO: 381 - protein, 21 aa, Artificial Sequence
  Description of Artificial Sequence: Synthetic peptide
  N-term Ac
  MOD_RES (9)..(9): Modified alanine amino acid connected by a reduced olefin crosslinker
  MISC_FEATURE (9)..(13): Crosslink between residues
  MOD_RES (13)..(13): Modified alanine amino acid connected by a reduced olefin crosslinker
  C-term NH2
IWIAQQLRAIGDAFNAYYARR

SEQ ID NO: 382 - protein, 19 aa, Artificial Sequence
  Description of Artificial Sequence: Synthetic peptide
  N-term FITC
  MOD_RES (1)..(1): 6-aminohexanoic acid
  MOD_RES (10)..(10): Alpha-Me S5-pentenyl-alanine olefin amino acid connected by an all-carbon crosslinker comprising one double bond
  MISC_FEATURE (10)..(14): Crosslink between residues
  MOD_RES (14)..(14): Alpha-Me S5-pentenyl-alanine olefin amino acid connected by an all-carbon crosslinker comprising one double bond
  MOD_RES (15)..(15): Norleucine
  MOD_RES (16)..(16): 2-aminoisobutyric acid
  C-term NH2
XRNIARHLAAVGDALXRSI

SEQ ID NO: 383 - protein, 22 aa, Artificial Sequence
  Description of Artificial Sequence: Synthetic peptide
  N-term FITC
  MOD_RES (1)..(1): 6-aminohexanoic acid
  MOD_RES (10)..(10): Alpha-Me S5-pentenyl-alanine olefin amino acid connected by an all-carbon crosslinker comprising one double bond
  MISC_FEATURE (10)..(14): Crosslink between residues
  MOD_RES (14)..(14): Alpha-Me S5-pentenyl-alanine olefin amino acid connected by an all-carbon crosslinker comprising one double bond
  C-term NH2
XIWIAQALRAIGDAFNAYYARR

SEQ ID NO: 384 - protein, 21 aa, Artificial Sequence
  Description of Artificial Sequence: Synthetic peptide
  N-term Ac
  MOD_RES (9)..(9): Cysteine crosslinked with butyl linkage
  MISC_FEATURE (9)..(13): Crosslink between residues
  MOD_RES (13)..(13): Cysteine crosslinked with butyl linkage
  C-term NH2
IWIAQELRCIGDCFNAYYARR

SEQ ID NO: 385 - protein, 21 aa, Artificial Sequence
  Description of Artificial Sequence: Synthetic peptide
  N-term Ac
  MOD_RES (9)..(9): Alpha-Me cysteine crosslinked with butyl linkage
  MISC_FEATURE (9)..(13): Crosslink between residues
  MOD_RES (13)..(13): Alpha-Me cysteine crosslinked with butyl linkage
  C-term NH2
IWIAQELRCIGDCFNAYYARR

SEQ ID NO: 386 - protein, 21 aa, Artificial Sequence
  Description of Artificial Sequence: Synthetic peptide
  N-term Ac
  MOD_RES (9)..(9): S-allyl cysteine
  MISC_FEATURE (9)..(13): Crosslink between residues
  MOD_RES (13)..(13): S-allyl cysteine
  C-term NH2
IWIAQELRCIGDCFNAYYARR

SEQ ID NO: 387 - protein, 21 aa, Artificial Sequence
  Description of Artificial Sequence: Synthetic peptide
  N-term Ac
  MOD_RES (9)..(9): Alpha-methylated S-allyl cysteine
  MISC_FEATURE (9)..(13): Crosslink between residues
  MOD_RES (13)..(13): Alpha-methylated S-allyl cysteine
  C-term NH2
IWIAQELRCIGDCFNAYYARR

SEQ ID NO: 388 - protein, 22 aa, Artificial Sequence
  Description of Artificial Sequence: Synthetic peptide
  N-term FITC
  MOD_RES (1)..(1): 6-aminohexanoic acid
  MOD_RES (10)..(10): Alpha-H S5-pentenyl-alanine olefin amino acid connected by an all-carbon crosslinker comprising one double bond
  MISC_FEATURE (10)..(14): Crosslink between residues
  MOD_RES (14)..(14): Alpha-H S5-pentenyl-alanine olefin amino acid connected by an all-carbon crosslinker comprising one double bond
  C-term NH2
XIWIAQELRAIGDAFNAYYARR

SEQ ID NO: 389 - protein, 22 aa, Artificial Sequence
  Description of Artificial Sequence: Synthetic peptide
  N-term 5-FAM
  MOD_RES (1)..(1): 6-aminohexanoic acid
  MOD_RES (10)..(10): Cysteine crosslinked with butyl linkage
  MISC_FEATURE (10)..(14): Crosslink between residues
  MOD_RES (14)..(14): Cysteine crosslinked with butyl linkage
  C-term NH2
XIWIAQELRCIGDCFNAYYARR

SEQ ID NO: 390 - protein, 22 aa, Artificial Sequence
  Description of Artificial Sequence: Synthetic peptide
  N-term 5-FAM
  MOD_RES (1)..(1): 6-aminohexanoic acid
  MOD_RES (10)..(10): Alpha-Me cysteine crosslinked with butyl linkage
  MISC_FEATURE (10)..(14): Crosslink between residues
  MOD_RES (14)..(14): Alpha-Me cysteine crosslinked with butyl linkage
  C-term NH2
XIWIAQELRCIGDCINAYYARR

SEQ ID NO: 391 - protein, 22 aa, Artificial Sequence
  Description of Artificial Sequence: Synthetic peptide
  N-term FITC
  MOD_RES (1)..(1): 6-aminohexanoic acid
  MOD_RES (10)..(10): S-allyl cysteine
  MISC_FEATURE (10)..(14): Crosslink between residues
  MOD_RES (14)..(14): S-allyl cysteine
  C-term NH2
XIWIAQELRCIGDCFNAYYARR

SEQ ID NO: 392 - protein, 22 aa, Artificial Sequence
  Description of Artificial Sequence: Synthetic peptide
  N-term FITC
  MOD_RES (1)..(1): 6-aminohexanoic acid
  MOD_RES (10)..(10): O-allyl serine
  MISC_FEATURE (10)..(14): Crosslink between residues
  MOD_RES (14)..(14): O-allyl serine
  C-term NH2
XIWIAQELRSIGDSFNAYYARR

SEQ ID NO: 393 - protein, 22 aa, Artificial Sequence
  Description of Artificial Sequence: Synthetic peptide
  N-term FITC
  MOD_RES (1)..(1): 6-aminohexanoic acid
  MOD_RES (10)..(10): Alpha-methylated S-allyl cysteine
  MISC_FEATURE (10)..(14): Crosslink between residues
  MOD_RES (14)..(14): Alpha-methylated S-allyl cysteine
  C-term NH2
XIWIAQELRCIGDCFNAYYARR

SEQ ID NO: 394 - protein, 21 aa, Artificial Sequence
  Description of Artificial Sequence: Synthetic peptide
  N-term Ac
  MOD_RES (9)..(9): Alpha-Me azide 1,4 triazole (4 carbon) amino acid
  MISC_FEATURE (9)..(13): Crosslink between residues
  MOD_RES (13)..(13): Alpha-Me alkyne 1,4 triazole (5 carbon) amino acid
  C-term NH2
IWIAQELRXIGDXFNAYYARR

SEQ ID NO: 395 - protein, 21 aa, Artificial Sequence
  Description of Artificial Sequence: Synthetic peptide
  N-term Ac
  MOD_RES (9)..(9): Alpha-Me alkyne 1,4 triazole (5 carbon) amino acid
  MISC_FEATURE (9)..(13): Crosslink between residues
  MOD_RES (13)..(13): Alpha-Me azide 1,4 triazole (4 carbon) amino acid
  C-term NH2
IWIAQELRXIGDXFNAYYARR

SEQ ID NO: 396 - protein, 21 aa, Artificial Sequence
  Description of Artificial Sequence: Synthetic peptide
  N-term Ac
  MOD_RES (9)..(9): Alpha-Me azide 1,5 triazole (3 carbon) amino acid
  MISC_FEATURE (9)..(13): Crosslink between residues
  MOD_RES (13)..(13): Alpha-Me alkyne 1,5 triazole (5 carbon) amino acid
  C-term NH2
IWIAQELRXIGDXFNAYYARR

SEQ ID NO: 397 - protein, 21 aa, Artificial Sequence
  Description of Artificial Sequence: Synthetic peptide
  N-term Ac
  MOD_RES (9)..(9): Alpha-Me alkyne 1,5 triazole (5 carbon) amino acid
  MISC_FEATURE (9)..(13): Crosslink between residues
  MOD_RES (13)..(13): Alpha-Me azide 1,5 triazole (3 carbon) amino acid
  C-term NH2
IWIAQELRXIGDXFNAYYARR

SEQ ID NO: 398 - protein, 21 aa, Artificial Sequence
  Description of Artificial Sequence: Synthetic peptide
  N-term Ac
  MOD_RES (9)..(9): Alpha-H azide 1,5 triazole (3 carbon) amino acid
  MISC_FEATURE (9)..(13): Crosslink between residues
  MOD_RES (13)..(13): Alpha-H alkyne 1,5 triazole (5 carbon) amino acid
  C-term NH2
IWIAQELRXIGDXFNAYYARR

SEQ ID NO: 399 - protein, 21 aa, Artificial Sequence
  Description of Artificial Sequence: Synthetic peptide
  N-term Ac
  MOD_RES (9)..(9): Alpha-H alkyne 1,5 triazole (5 carbon) amino acid
  MISC_FEATURE (9)..(13): Crosslink between residues
  MOD_RES (13)..(13): Alpha-H azide 1,5 triazole (3 carbon) amino acid
  C-term NH2
IWIAQELRXIGDXFNAYYARR

SEQ ID NO: 400 - protein, 22 aa, Artificial Sequence
  Description of Artificial Sequence: Synthetic peptide
  N-term FITC
  MOD_RES (1)..(1): 6-aminohexanoic acid
  MOD_RES (10)..(10): Alpha-Me azide 1,4 triazole (4 carbon) amino acid
  MISC_FEATURE (10)..(14): Crosslink between residues
  MOD_RES (14)..(14): Alpha-Me alkyne 1,4 triazole (5 carbon) amino acid
  C-term NH2
XIWIAQELRXIGDXFNAYYARR

SEQ ID NO: 401 - protein, 22 aa, Artificial Sequence
  Description of Artificial Sequence: Synthetic peptide
  N-term FITC
  MOD_RES (1)..(1): 6-aminohexanoic acid
  MOD_RES (10)..(10): Alpha-Me alkyne 1,4 triazole (5 carbon) amino acid
  MISC_FEATURE (10)..(14): Crosslink between residues
  MOD_RES (14)..(14): Alpha-Me azide 1,4 triazole (4 carbon) amino acid
  C-term NH2
XIWIAQELRXIGDXFNAYYARR

SEQ ID NO: 402 - protein, 22 aa, Artificial Sequence
  Description of Artificial Sequence: Synthetic peptide
  N-term FITC
  MOD_RES (1)..(1): 6-aminohexanoic acid
  MOD_RES (10)..(10): Alpha-Me azide 1,5 triazole (3 carbon) amino acid
  MISC_FEATURE (10)..(14): Crosslink between residues
  MOD_RES (14)..(14): Alpha-Me alkyne 1,5 triazole (5 carbon) amino acid
  C-term NH2
XIWIAQELRXIGDXFNAYYARR

SEQ ID NO: 403 - protein, 22 aa, Artificial Sequence
  Description of Artificial Sequence: Synthetic peptide
  N-term FITC
  MOD_RES (1)..(1): 6-aminohexanoic acid
  MOD_RES (10)..(10): Alpha-Me alkyne 1,5 triazole (5 carbon) amino acid
  MISC_FEATURE (10)..(14): Crosslink between residues
  MOD_RES (14)..(14): Alpha-Me azide 1,5 triazole (3 carbon) amino acid
  C-term NH2
XIWIAQELRXIGDXFNAYYARR

SEQ ID NO: 404 - protein, 22 aa, Artificial Sequence
  Description of Artificial Sequence: Synthetic peptide
  N-term FITC
  MOD_RES (1)..(1): 6-aminohexanoic acid
  MOD_RES (10)..(10): Alpha-H azide 1,5 triazole (3 carbon) amino acid
  MISC_FEATURE (10)..(14): Crosslink between residues
  MOD_RES (14)..(14): Alpha-H alkyne 1,5 triazole (5 carbon) amino acid
  C-term NH2
XIWIAQELRXIGDXFNAYYARR

SEQ ID NO: 405 - protein, 22 aa, Artificial Sequence
  Description of Artificial Sequence: Synthetic peptide
  N-term FITC
  MOD_RES (1)..(1): 6-aminohexanoic acid
  MOD_RES (10)..(10): Alpha-H alkyne 1,5 triazole (5 carbon) amino acid
  MISC_FEATURE (10)..(14): Crosslink between residues
  MOD_RES (14)..(14): Alpha-H azide 1,5 triazole (3 carbon) amino acid
  C-term NH2
XIWIAQELRXIGDXFNAYYARR

SEQ ID NO: 406 - protein, 21 aa, Artificial Sequence
  Description of Artificial Sequence: Synthetic peptide
  N-term Ac
  MOD_RES (9)..(9): Alpha-Me S5-pentenyl-alanine olefin amino acid connected by an all-carbon crosslinker comprising one double bond
  MISC_FEATURE (9)..(13): Crosslink between residues
  MOD_RES (13)..(13): Alpha-Me S5-pentenyl-alanine olefin amino acid connected by an all-carbon crosslinker comprising one double bond
  C-term NH2
IWIAQALRAIENAFNAYYARR

SEQ ID NO: 407 - protein, 21 aa, Artificial Sequence
  Description of Artificial Sequence: Synthetic peptide
  N-term Ac
  MOD_RES (9)..(9): Alpha-Me S5-pentenyl-alanine olefin amino acid not connected by any crosslinker
  MOD_RES (13)..(13): Alpha-Me S5-pentenyl-alanine olefin amino acid not connected by any crosslinker
  C-term NH2
RWIAQALRAIGDAFNAFYARR

SEQ ID NO: 408 - protein, 21 aa, Artificial Sequence
  Description of Artificial Sequence: Synthetic peptide
  N-term Ac
  MOD_RES (9)..(9): Alpha-Me S5-pentenyl-alanine olefin amino acid not connected by any crosslinker
  MOD_RES (13)..(13): Alpha-Me S5-pentenyl-alanine olefin amino acid not connected by any crosslinker
  C-term NH2
IWIAQALRAIGNAFNAYYARR

SEQ ID NO: 409 - protein, 21 aa, Artificial Sequence
  Description of Artificial Sequence: Synthetic peptide
  N-term Ac
  MOD_RES (9)..(9): Alpha-Me S5-pentenyl-alanine olefin amino acid not connected by any crosslinker
  MOD_RES (13)..(13): Alpha-Me S5-pentenyl-alanine olefin amino acid not connected by any crosslinker
  C-term NH2
IWIAQALRAIGDAFNAYYARR

SEQ ID NO: 410 - protein, 21 aa, Artificial Sequence
  Description of Artificial Sequence: Synthetic peptide
  N-term Ac
  MOD_RES (4)..(4): Cyclohexyl-Ala
  MOD_RES (9)..(9): Alpha-Me S5-pentenyl-alanine olefin amino acid connected by an all-carbon crosslinker comprising one double bond
  MISC_FEATURE (9)..(13): Crosslink between residues
  MOD_RES (13)..(13): Alpha-Me S5-pentenyl-alanine olefin amino acid connected by an all-carbon crosslinker comprising one double bond
  C-term NH2
RWIAQALRAIGDAFNAFYARR

SEQ ID NO: 411 - protein, 21 aa, Artificial Sequence
  Description of Artificial Sequence: Synthetic peptide
  N-term Ac
  MOD_RES (9)..(9): Alpha-Me S5-pentenyl-alanine olefin amino acid connected by an all-carbon crosslinker comprising one double bond
  MISC_FEATURE (9)..(13): Crosslink between residues
  MOD_RES (11)..(11): Cyclohexyl-Ala
  MOD_RES (13)..(13): Alpha-Me S5-pentenyl-alanine olefin amino acid connected by an all-carbon crosslinker comprising one double bond
  C-term NH2
RWIAQALRAIADAFNAFYARR

SEQ ID NO: 412 - protein, 21 aa, Artificial Sequence
  Description of Artificial Sequence: Synthetic peptide
  N-term Ac
  MOD_RES (9)..(9): Alpha-Me S5-pentenyl-alanine olefin amino acid connected by an all-carbon crosslinker comprising one double bond
  MISC_FEATURE (9)..(13): Crosslink between residues
  MOD_RES (13)..(13): Alpha-Me S5-pentenyl-alanine olefin amino acid connected by an all-carbon crosslinker comprising one double bond
  C-term NH2
RWIAQALRAIGDAFNAFYARR

SEQ ID NO: 413 - protein, 21 aa, Artificial Sequence
  Description of Artificial Sequence: Synthetic peptide
  N-term Ac
  MOD_RES (9)..(9): Alpha-Me S5-pentenyl-alanine olefin amino acid connected by an all-carbon crosslinker comprising one double bond
  MISC_FEATURE (9)..(13): Crosslink between residues
  MOD_RES (13)..(13): Alpha-Me S5-pentenyl-alanine olefin amino acid connected by an all-carbon crosslinker comprising one double bond
  MOD_RES (16)..(16): Cyclohexyl-Ala
  C-term NH2
RWIAQALRAIGDAFNAFYARR

SEQ ID NO: 414 - protein, 21 aa, Artificial Sequence
  Description of Artificial Sequence: Synthetic peptide
  N-term Ac
  MOD_RES (9)..(9): Alpha-Me S5-pentenyl-alanine olefin amino acid connected by an all-carbon crosslinker comprising one double bond
  MISC_FEATURE (9)..(13): Crosslink between residues
  MOD_RES (13)..(13): Alpha-Me S5-pentenyl-alanine olefin amino acid connected by an all-carbon crosslinker comprising one double bond
  MOD_RES (19)..(19): Cyclohexyl-Ala
  C-term NH2
RWIAQALRAIGDAFNAFYARR

SEQ ID NO: 415 - protein, 21 aa, Artificial Sequence
  Description of Artificial Sequence: Synthetic peptide
  N-term Ac
  MOD_RES (4)..(4): Cyclohexyl-Ala
  MOD_RES (9)..(9): Alpha-Me S5-pentenyl-alanine olefin amino acid connected by an all-carbon crosslinker comprising one double bond
  MISC_FEATURE (9)..(13): Crosslink between residues
  MOD_RES (13)..(13): Alpha-Me S5-pentenyl-alanine olefin amino acid connected by an all-carbon crosslinker comprising one double bond
  C-term NH2
IWIAQALRAIGNAFNAYYARR

SEQ ID NO: 416 - protein, 21 aa, Artificial Sequence
  Description of Artificial Sequence: Synthetic peptide
  N-term Ac
  MOD_RES (9)..(9): Alpha-Me S5-pentenyl-alanine olefin amino acid connected by an all-carbon crosslinker comprising one double bond
  MISC_FEATURE (9)..(13): Crosslink between residues
  MOD_RES (11)..(11): Cyclohexyl-Ala
  MOD_RES (13)..(13): Alpha-Me S5-pentenyl-alanine olefin amino acid connected by an all-carbon crosslinker comprising one double bond
  C-term NH2
IWIAQALRAIANAFNAYYARR

SEQ ID NO: 417 - protein, 21 aa, Artificial Sequence
  Description of Artificial Sequence: Synthetic peptide
  N-term Ac
  MOD_RES (9)..(9): Alpha-Me S5-pentenyl-alanine olefin amino acid connected by an all-carbon crosslinker comprising one double bond
  MISC_FEATURE (9)..(13): Crosslink between residues
  MOD_RES (13)..(13): Alpha-Me S5-pentenyl-alanine olefin amino acid connected by an all-carbon crosslinker comprising one double bond
  C-term NH2
IWIAQALRAIGNAFNAYYARR

SEQ ID NO: 418 - protein, 21 aa, Artificial Sequence
  Description of Artificial Sequence: Synthetic peptide
  N-term Ac
  MOD_RES (9)..(9): Alpha-Me S5-pentenyl-alanine olefin amino acid connected by an all-carbon crosslinker comprising one double bond
  MISC_FEATURE (9)..(13): Crosslink between residues
  MOD_RES (13)..(13): Alpha-Me S5-pentenyl-alanine olefin amino acid connected by an all-carbon crosslinker comprising one double bond
  MOD_RES (16)..(16): Cyclohexyl-Ala
  C-term NH2
IWIAQALRAIGNAFNAYYARR

SEQ ID NO: 419 - protein, 21 aa, Artificial Sequence
  Description of Artificial Sequence: Synthetic peptide
  N-term Ac
  MOD_RES (9)..(9): Alpha-Me S5-pentenyl-alanine olefin amino acid connected by an all-carbon crosslinker comprising one double bond
  MISC_FEATURE (9)..(13): Crosslink between residues
  MOD_RES (13)..(13): Alpha-Me S5-pentenyl-alanine olefin amino acid connected by an all-carbon crosslinker comprising one double bond
  MOD_RES (19)..(19): Cyclohexyl-Ala
  C-term NH2
IWIAQALRAIGNAFNAYYARR

SEQ ID NO: 420 - protein, 19 aa, Artificial Sequence
  Description of Artificial Sequence: Synthetic peptide
  N-term heptenoic acid crosslinked with position 4 via an all-carbon crosslinker comprising one double bond
  MOD_RES (4)..(4): Alpha-Me S5-pentenyl-alanine olefin amino acid connected by an all-carbon crosslinker comprising one double bond
  MISC_FEATURE (4)..(7): Crosslink between residues
  MOD_RES (7)..(7): Alpha-Me S5-pentenyl-alanine olefin amino acid connected by an all-carbon crosslinker comprising one double bond
  MISC_FEATURE (7)..(11): Crosslink between residues
  MOD_RES (11)..(11): Alpha-Me S5-pentenyl-alanine olefin amino acid connected by an all-carbon crosslinker comprising one double bond
  C-term NH2
IAQALRAIGDAFNAFYARR

SEQ ID NO: 421 - protein, 32 aa, Artificial Sequence
  Description of Artificial Sequence: Synthetic polypeptide
  N-term Ac
  C-term NH2
YGRKKRRQRRRIWIAQELRRIGDEFNAYYARR

SEQ ID NO: 422 - protein, 33 aa, Artificial Sequence
  Description of Artificial Sequence: Synthetic polypeptide
  N-term FITC
  MOD_RES (1)..(1): 6-aminohexanoic acid
  C-term NH2
XYGRKKRRQRRRIWIAQELRRIGDEFNAYYARR

SEQ ID NO: 423 - protein, 21 aa, Artificial Sequence
  Description of Artificial Sequence: Synthetic peptide
  N-term Ac
  MOD_RES (9)..(9): Alpha-Me S5-pentenyl-alanine olefin amino acid connected by an all-carbon crosslinker comprising one double bond
  MISC_FEATURE (9)..(13): Crosslink between residues
  MOD_RES (13)..(13): Alpha-Me S5-pentenyl-alanine olefin amino acid connected by an all-carbon crosslinker comprising one double bond
  C-term NH2
RWIAQALRAIGDAFNAFYAHR

SEQ ID NO: 424 - protein, 21 aa, Artificial Sequence
  Description of Artificial Sequence: Synthetic peptide
  N-term Ac
  MOD_RES (9)..(9): Alpha-Me S5-pentenyl-alanine olefin amino acid connected by an all-carbon crosslinker comprising one double bond
  MISC_FEATURE (9)..(13): Crosslink between residues
  MOD_RES (13)..(13): Alpha-Me S5-pentenyl-alanine olefin amino acid connected by an all-carbon crosslinker comprising one double bond
  C-term NH2
RWIAQALRAIGDAFNAFYARH

SEQ ID NO: 425 - protein, 21 aa, Artificial Sequence
  Description of Artificial Sequence: Synthetic peptide
  N-term Ac
  MOD_RES (9)..(9): Alpha-Me S5-pentenyl-alanine olefin amino acid connected by an all-carbon crosslinker comprising one double bond
  MISC_FEATURE (9)..(13): Crosslink between residues
  MOD_RES (13)..(13): Alpha-Me S5-pentenyl-alanine olefin amino acid connected by an all-carbon crosslinker comprising one double bond
  C-term NH2
RWIAQSLRAIGDAFNAFYARR

SEQ ID NO: 426 - protein, 21 aa, Artificial Sequence
  Description of Artificial Sequence: Synthetic peptide
  N-term Ac
  MOD_RES (9)..(9): Alpha-H azide 1,4 triazole (4 carbon) amino acid
  MISC_FEATURE (9)..(13): Crosslink between residues
  MOD_RES (13)..(13): Alpha-H alkyne 1,4 triazole (5 carbon) amino acid
  C-term NH2
IWIAQELRXIGDXFNAYYARR

SEQ ID NO: 427 - protein, 22 aa, Artificial Sequence
  Description of Artificial Sequence: Synthetic peptide
  N-term FITC
  MOD_RES (1)..(1): 6-aminohexanoic acid
  MOD_RES (10)..(10): Alpha-Me S5-pentenyl-alanine olefin amino acid not connected by any crosslinker
  MOD_RES (14)..(14): Alpha-Me S5-pentenyl-alanine olefin amino acid not connected by any crosslinker
  C-term NH2
XRWIAQALRAIGNAFNAYYARR

SEQ ID NO: 428 - protein, 22 aa, Artificial Sequence
  Description of Artificial Sequence: Synthetic peptide
  N-term FITC
  MOD_RES (1)..(1): 6-aminohexanoic acid
  MOD_RES (10)..(10): Alpha-Me S5-pentenyl-alanine olefin amino acid not connected by any crosslinker
  MOD_RES (14)..(14): Alpha-Me S5-pentenyl-alanine olefin amino acid not connected by any crosslinker
  C-term NH2
XRWIAQALRAIGDAFNAFYARR

SEQ ID NO: 429 - protein, 22 aa, Artificial Sequence
  Description of Artificial Sequence: Synthetic peptide
  N-term FITC
  MOD_RES (1)..(1): 6-aminohexanoic acid
  MOD_RES (10)..(10): Alpha-Me S5-pentenyl-alanine olefin amino acid not connected by any crosslinker
  MOD_RES (14)..(14): Alpha-Me S5-pentenyl-alanine olefin amino acid not connected by any crosslinker
  C-term NH2
XIWIAQALRAIGNAFNAYYARR

SEQ ID NO: 430 - protein, 22 aa, Artificial Sequence
  Description of Artificial Sequence: Synthetic peptide
  N-term FITC
  MOD_RES (1)..(1): 6-aminohexanoic acid
  MOD_RES (10)..(10): Alpha-Me S5-pentenyl-alanine olefin amino acid not connected by any crosslinker
  MOD_RES (14)..(14): Alpha-Me S5-pentenyl-alanine olefin amino acid not connected by any crosslinker
  C-term NH2
XIWIAQALRAIGDAFNAYYARR

SEQ ID NO: 431 - protein, 22 aa, Artificial Sequence
  Description of Artificial Sequence: Synthetic peptide
  N-term FITC
  MOD_RES (1)..(1): 6-aminohexanoic acid
  MOD_RES (10)..(10): Alpha-methylated O-allyl serine
  MISC_FEATURE (10)..(14): Crosslink between residues
  MOD_RES (14)..(14): Alpha-methylated O-allyl serine
  C-term NH2
XIWIAQELRSIGDSFNAYYARR

SEQ ID NO: 432 - protein, 22 aa, Artificial Sequence
  Description of Artificial Sequence: Synthetic peptide
  N-term Biotin
  MOD_RES (1)..(1): 6-aminohexanoic acid
  C-term NH2
XRWIAQALRRIGDEFNAFYARR

SEQ ID NO: 433 - protein, 22 aa, Artificial Sequence
  Description of Artificial Sequence: Synthetic peptide
  N-term Biotin
  MOD_RES (1)..(1): 6-aminohexanoic acid
  C-term NH2
XRWIAQALRRIGNEFNAYYARR

SEQ ID NO: 434 - protein, 22 aa, Artificial Sequence
  Description of Artificial Sequence: Synthetic peptide
  N-term Biotin
  MOD_RES (1)..(1): 6-aminohexanoic acid
  C-term NH2
XIWIAQALRRIGNEFNAYYARR

SEQ ID NO: 435 - protein, 22 aa, Artificial Sequence
  Description of Artificial Sequence: Synthetic peptide
  N-term Biotin
  MOD_RES (1)..(1): 6-aminohexanoic acid
  C-term NH2
XIWIAQALRRIGDEFNAYYARR

SEQ ID NO: 436 - protein, 22 aa, Artificial Sequence
  Description of Artificial Sequence: Synthetic peptide
  N-term FITC
  MOD_RES (1)..(1): 6-aminohexanoic acid
  C-term NH2
XIWIAQALRRIGDEFNAYYARR

SEQ ID NO: 437 - protein, 22 aa, Artificial Sequence
  Description of Artificial Sequence: Synthetic peptide
  N-term Biotin
  MOD_RES (1)..(1): 6-aminohexanoic acid
  MOD_RES (10)..(10): Alpha-Me S5-pentenyl-alanine olefin amino acid connected by an all-carbon crosslinker comprising one double bond
  MISC_FEATURE (10)..(14): Crosslink between residues
  MOD_RES (14)..(14): Alpha-Me S5-pentenyl-alanine olefin amino acid connected by an all-carbon crosslinker comprising one double bond
  C-term NH2
XRWIAQALRAIGDAFNAFYARR

SEQ ID NO: 438 - protein, 22 aa, Artificial Sequence
  Description of Artificial Sequence: Synthetic peptide
  N-term Biotin
  MOD_RES (1)..(1): 6-aminohexanoic acid
  MOD_RES (10)..(10): Alpha-Me S5-pentenyl-alanine olefin amino acid connected by an all-carbon crosslinker comprising one double bond
  MISC_FEATURE (10)..(14): Crosslink between residues
  MOD_RES (14)..(14): Alpha-Me S5-pentenyl-alanine olefin amino acid connected by an all-carbon crosslinker comprising one double bond
  C-term NH2
XRWIAQALRAIGNAFNAYYARR

SEQ ID NO: 439 - protein, 22 aa, Artificial Sequence
  Description of Artificial Sequence: Synthetic peptide
  N-term Biotin
  MOD_RES (1)..(1): 6-aminohexanoic acid
  MOD_RES (10)..(10): Alpha-Me S5-pentenyl-alanine olefin amino acid connected by an all-carbon crosslinker comprising one double bond
  MISC_FEATURE (10)..(14): Crosslink between residues
  MOD_RES (14)..(14): Alpha-Me S5-pentenyl-alanine olefin amino acid connected by an all-carbon crosslinker comprising one double bond
  C-term NH2
XIWIAQALRAIGNAFNAYYARR

SEQ ID NO: 440 - protein, 22 aa, Artificial Sequence
  Description of Artificial Sequence: Synthetic peptide
  N-term Biotin
  MOD_RES (1)..(1): 6-aminohexanoic acid
  MOD_RES (10)..(10): Alpha-Me S5-pentenyl-alanine olefin amino acid connected by an all-carbon crosslinker comprising one double bond
  MISC_FEATURE (10)..(14): Crosslink between residues
  MOD_RES (14)..(14): Alpha-Me S5-pentenyl-alanine olefin amino acid connected by an all-carbon crosslinker comprising one double bond
  C-term NH2
XIWIAQALRAIGDAFNAYYARR

SEQ ID NO: 441 - protein, 22 aa, Artificial Sequence
  Description of Artificial Sequence: Synthetic peptide
  N-term Biotin
  MOD_RES (1)..(1): 6-aminohexanoic acid
  MOD_RES (10)..(10): Alpha-Me S5-pentenyl-alanine olefin amino acid connected by an all-carbon crosslinker comprising one double bond
  MISC_FEATURE (10)..(14): Crosslink between residues
  MOD_RES (14)..(14): Alpha-Me S5-pentenyl-alanine olefin amino acid connected by an all-carbon crosslinker comprising one double bond
  C-term NH2
XIWIAQALRAIGDAFNAFYARR

SEQ ID NO: 442 - protein, 22 aa, Artificial Sequence
  Description of Artificial Sequence: Synthetic peptide
  N-term 5-FAM
  MOD_RES (1)..(1): 6-aminohexanoic acid
  MOD_RES (10)..(10): Alpha-Me S5-pentenyl-alanine olefin amino acid connected by an all-carbon crosslinker comprising one double bond
  MISC_FEATURE (10)..(14): Crosslink between residues
  MOD_RES (14)..(14): Alpha-Me S5-pentenyl-alanine olefin amino acid connected by an all-carbon crosslinker comprising one double bond
  C-term NH2
XIWIAQELRAIGDAFNAYYARR

SEQ ID NO: 443 - protein, 19 aa, Artificial Sequence
  Description of Artificial Sequence: Synthetic peptide
  N-term Du
  MOD_RES (4)..(4): Diaminopropionic acid
  C-term NH2
IAQXLRRIGDEFNAYYARR

SEQ ID NO: 444 - protein, 19 aa, Artificial Sequence
  Description of Artificial Sequence: Synthetic peptide
  N-term Du
  MOD_RES (4)..(4): Diaminopropionic acid
  C-term NH2
IAQXLRRIGDQFNAYYARR

SEQ ID NO: 445 - protein, 20 aa, Artificial Sequence
  Description of Artificial Sequence: Synthetic peptide
  N-term Du
  MOD_RES (4)..(4): Diaminopropionic acid
  C-term NH2
WIAXALRRIGDEFNAYYARR

SEQ ID NO: 446 - protein, 20 aa, Artificial Sequence
  Description of Artificial Sequence: Synthetic peptide
  N-term Du
  MOD_RES (4)..(4): Diaminopropionic acid
  C-term NH2
WIAXALRRIGDQFNAYYARR

SEQ ID NO: 447 - protein, 22 aa, Artificial Sequence
  Description of Artificial Sequence: Synthetic peptide
  N-term 5-FAM
  MOD_RES (1)..(1): 6-aminohexanoic acid
  C-term NH2
XIWIAQALRRIGDEFNAYYARR

SEQ ID NO: 448 - protein, 22 aa, Artificial Sequence
  Description of Artificial Sequence: Synthetic peptide
  N-term 5-FAM
  MOD_RES (1)..(1): 6-aminohexanoic acid
  MOD_RES (10)..(10): Alpha-Me S5-pentenyl-alanine olefin amino acid connected by an all-carbon crosslinker comprising one double bond
  MISC_FEATURE (10)..(14): Crosslink between residues
  MOD_RES (14)..(14): Alpha-Me S5-pentenyl-alanine olefin amino acid connected by an all-carbon crosslinker comprising one double bond
  C-term NH2
XIWIAQALRAIGDAFNAYYARR

SEQ ID NO: 449 - protein, 22 aa, Artificial Sequence
  Description of Artificial Sequence: Synthetic peptide
  N-term 5-FAM
  MOD_RES (1)..(1): 6-aminohexanoic acid
  C-term NH2
XIWIAQAARRDIGEANAYYARR

SEQ ID NO: 450 - protein, 22 aa, Artificial Sequence
  Description of Artificial Sequence: Synthetic peptide
  N-term 5-FAM
  MOD_RES (1)..(1): 6-aminohexanoic acid
  MOD_RES (10)..(10): Alpha-Me S5-pentenyl-alanine olefin amino acid connected by an all-carbon crosslinker comprising one double bond
  MISC_FEATURE (10)..(14): Crosslink between residues
  MOD_RES (14)..(14): Alpha-Me S5-pentenyl-alanine olefin amino acid connected by an all-carbon crosslinker comprising one double bond
  C-term NH2
XRWIAQALRAIGDAFNAFYARR

SEQ ID NO: 451 - protein, 22 aa, Artificial Sequence
  Description of Artificial Sequence: Synthetic peptide
  N-term 5-FAM
  MOD_RES (1)..(1): 6-aminohexanoic acid
  C-term NH2
XIWIAQALRRIGDEFNAFYARR

SEQ ID NO: 452 - protein, 21 aa, Artificial Sequence
  Description of Artificial Sequence: Synthetic peptide
  N-term Ac
  MOD_RES (7)..(7): Alpha-Me-Leu
  MOD_RES (9)..(9): Alpha-Me S5-pentenyl-alanine olefin amino acid connected by an all-carbon crosslinker comprising one double bond
  MISC_FEATURE (9)..(13): Crosslink between residues
  MOD_RES (13)..(13): Alpha-Me S5-pentenyl-alanine olefin amino acid connected by an all-carbon crosslinker comprising one double bond
  C-term NH2
IWIAQELRAIGDAFNAYYARR

SEQ ID NO: 453 - protein, 21 aa, Artificial Sequence
  Description of Artificial Sequence: Synthetic peptide
  N-term Ac
  MOD_RES (9)..(9): Alpha-Me S5-pentenyl-alanine olefin amino acid connected by an all-carbon crosslinker comprising one double bond
  MISC_FEATURE (9)..(13): Crosslink between residues
  MOD_RES (13)..(13): Alpha-Me S5-pentenyl-alanine olefin amino acid connected by an all-carbon crosslinker comprising one double bond
  MOD_RES (16)..(16): 2-aminoisobutyric acid
  C-term NH2
IWIAQELRAIGDAFNXYYARR

SEQ ID NO: 454 - protein, 21 aa, Artificial Sequence
  Description of Artificial Sequence: Synthetic peptide
  N-term Ac
  MOD_RES (9)..(9): Alpha-Me S5-pentenyl-alanine olefin amino acid connected by an all-carbon crosslinker comprising one double bond
  MISC_FEATURE (9)..(13): Crosslink between residues
  MOD_RES (13)..(13): Alpha-Me S5-pentenyl-alanine olefin amino acid connected by an all-carbon crosslinker comprising one double bond
  MOD_RES (17)..(17): Alpha-methyl-L-Phe
  C-term NH2
IWIAQELRAIGDAFNAFYARR

SEQ ID NO: 455 - protein, 21 aa, Artificial Sequence
  Description of Artificial Sequence: Synthetic peptide
  N-term Ac
  MOD_RES (9)..(9): Alpha-Me S5-pentenyl-alanine olefin amino acid connected by an all-carbon crosslinker comprising one double bond
  MISC_FEATURE (9)..(13): Crosslink between residues
  MOD_RES (13)..(13): Alpha-Me S5-pentenyl-alanine olefin amino acid connected by an all-carbon crosslinker comprising one double bond
  MOD_RES (18)..(18): Alpha-methyl-L-Phe
  C-term NH2
IWIAQELRAIGDAFNAYFARR

SEQ ID NO: 456 - protein, 21 aa, Artificial Sequence
  Description of Artificial Sequence: Synthetic peptide
  N-term Ac
  MOD_RES (9)..(9): Alpha-Me S5-pentenyl-alanine olefin amino acid connected by an all-carbon crosslinker comprising one double bond
  MISC_FEATURE (9)..(13): Crosslink between residues
  MOD_RES (13)..(13): Alpha-Me S5-pentenyl-alanine olefin amino acid connected by an all-carbon crosslinker comprising one double bond
  MOD_RES (17)..(17): Alpha-methylated tyrosine O-methyl ether
  C-term NH2
IWIAQELRAIGDAFNAYYARR

SEQ ID NO: 457 - protein, 21 aa, Artificial Sequence
  Description of Artificial Sequence: Synthetic peptide
  N-term Ac
  MOD_RES (9)..(9): Alpha-Me S5-pentenyl-alanine olefin amino acid connected by an all-carbon crosslinker comprising one double bond
  MISC_FEATURE (9)..(13): Crosslink between residues
  MOD_RES (13)..(13): Alpha-Me S5-pentenyl-alanine olefin amino acid connected by an all-carbon crosslinker comprising one double bond
  MOD_RES (18)..(18): Alpha-methylated tyrosine O-methyl ether
  C-term NH2
IWIAQELRAIGDAFNAYYARR

SEQ ID NO: 458 - protein, 21 aa, Artificial Sequence
  Description of Artificial Sequence: Synthetic peptide
  N-term Ac
  MOD_RES (9)..(9): Alpha-Me S5-pentenyl-alanine olefin amino acid connected by an all-carbon crosslinker comprising one double bond
  MISC_FEATURE (9)..(13): Crosslink between residues
  MOD_RES (13)..(13): Alpha-Me S5-pentenyl-alanine olefin amino acid connected by an all-carbon crosslinker comprising one double bond
  MOD_RES (20)..(20): Alpha-methyl-L-Arg
  C-term NH2
IWIAQELRAIGDAFNAYYARR

SEQ ID NO: 459 - protein, 21 aa, Artificial Sequence
  Description of Artificial Sequence: Synthetic peptide
  N-term Ac
  MOD_RES (9)..(9): Alpha-Me S5-pentenyl-alanine olefin amino acid connected by an all-carbon crosslinker comprising one double bond
  MISC_FEATURE (9)..(13): Crosslink between residues
  MOD_RES (13)..(13): Alpha-Me S5-pentenyl-alanine olefin amino acid connected by an all-carbon crosslinker comprising one double bond
  C-term NH2
IWIAQELRAIGDAFNAYFARR

SEQ ID NO: 460 - protein, 21 aa, Artificial Sequence
  Description of Artificial Sequence: Synthetic peptide
  N-term Ac
  MOD_RES (9)..(9): Alpha-Me S5-pentenyl-alanine olefin amino acid connected by an all-carbon crosslinker comprising one double bond
  MISC_FEATURE (9)..(13): Crosslink between residues
  MOD_RES (13)..(13): Alpha-Me S5-pentenyl-alanine olefin amino acid connected by an all-carbon crosslinker comprising one double bond
  C-term NH2
IWIAQELRAIGDAFNAFYARR

SEQ ID NO: 461 - protein, 21 aa, Artificial Sequence
  Description of Artificial Sequence: Synthetic peptide
  N-term Ac
  MOD_RES (9)..(9): Alpha-Me S5-pentenyl-alanine olefin amino acid connected by an all-carbon crosslinker comprising one double bond
  MISC_FEATURE (9)..(13): Crosslink between residues
  MOD_RES (13)..(13): Alpha-Me S5-pentenyl-alanine olefin amino acid connected by an all-carbon crosslinker comprising one double bond
  C-term NH2
RWIAQELRAIGDAFNAFYARR

SEQ ID NO: 462 - protein, 21 aa, Artificial Sequence
  Description of Artificial Sequence: Synthetic peptide
  N-term Ac
  MOD_RES (9)..(9): Alpha-Me S5-pentenyl-alanine olefin amino acid connected by an all-carbon crosslinker comprising one double bond
  MISC_FEATURE (9)..(13): Crosslink between residues
  MOD_RES (13)..(13): Alpha-Me S5-pentenyl-alanine olefin amino acid connected by an all-carbon crosslinker comprising one double bond
  MOD_RES (17)..(17): Alpha-methyl-L-Phe
  C-term NH2
RWIAQALRAIGDAFNAFYARR

SEQ ID NO: 463 - protein, 21 aa, Artificial Sequence
  Description of Artificial Sequence: Synthetic peptide
  N-term Ac
  MOD_RES (9)..(9): Alpha-Me S5-pentenyl-alanine olefin amino acid connected by an all-carbon crosslinker comprising one double bond
  MISC_FEATURE (9)..(13): Crosslink between residues
  MOD_RES (13)..(13): Alpha-Me S5-pentenyl-alanine olefin amino acid connected by an all-carbon crosslinker comprising one double bond
  MOD_RES (20)..(20): Alpha-methyl-L-Arg
  C-term NH2
RWIAQALRAIGDAFNAFYARR

SEQ ID NO: 464 - protein, 21 aa, Artificial Sequence
  Description of Artificial Sequence: Synthetic peptide
  N-term Ac
  MOD_RES (5)..(5): Alpha-Me R5-pentenyl-alanine olefin amino acid connected by an all-carbon crosslinker comprising one double bond
  MISC_FEATURE (5)..(9): Crosslink between residues
  MOD_RES (9)..(9): Two pentenyl-alanine olefin side chains, each of which is crosslinked to another amino acid as indicated
  MISC_FEATURE (9)..(13): Crosslink between residues
  MOD_RES (13)..(13): Alpha-Me S5-pentenyl-alanine olefin amino acid connected by an all-carbon crosslinker comprising one double bond
  C-term NH2
IWIAAALRAIGDAFNAYYARR

SEQ ID NO: 465 - protein, 21 aa, Artificial Sequence
  Description of Artificial Sequence: Synthetic peptide
  N-term Ac
  MOD_RES (5)..(5): Alpha-Me S5-pentenyl-alanine olefin amino acid connected by an all-carbon crosslinker comprising one double bond
  MISC_FEATURE (5)..(9): Crosslink between residues
  MOD_RES (9)..(9): Two pentenyl-alanine olefin side chains, each of which is crosslinked to another amino acid as indicated
  MISC_FEATURE (9)..(16): Crosslink between residues
  MOD_RES (16)..(16): Alpha-Me S8-octenyl-alanine olefin amino acid connected by an all-carbon crosslinker comprising one double bond
  C-term NH2
IWIAAALRAIGDEFNAYYARR

SEQ ID NO: 466 - protein, 21 aa, Artificial Sequence
  Description of Artificial Sequence: Synthetic peptide
  N-term Ac
  MOD_RES (9)..(9): Alpha-Me R5-pentenyl-alanine olefin amino acid connected by an all-carbon crosslinker comprising one double bond
  MISC_FEATURE (9)..(13): Crosslink between residues
  MOD_RES (13)..(13): Two pentenyl-alanine olefin side chains, each of which is crosslinked to another amino acid as indicated
  MISC_FEATURE (13)..(17): Crosslink between residues
  MOD_RES (17)..(17): Alpha-Me S5-pentenyl-alanine olefin amino acid connected by an all-carbon crosslinker comprising one double bond
  C-term NH2
IWIAQALRAIGDAFNAAYARR

SEQ ID NO: 467 - protein, 22 aa, Artificial Sequence
  Description of Artificial Sequence: Synthetic peptide
  N-term 5-FAM
  MOD_RES (1)..(1): 6-aminohexanoic acid
  MOD_RES (10)..(10): Lys with side-chain is involved in lactam formation
  MOD_RES (14)..(14): Asp with side-chain is involved in lactam formation
  C-term NH2
XIWIAQELRKIGDDFNAYYARR

SEQ ID NO: 468 - protein, 22 aa, Artificial Sequence
  Description of Artificial Sequence: Synthetic peptide
  N-term 5-FAM
  MOD_RES (1)..(1): 6-aminohexanoic acid
  MOD_RES (10)..(10): Asp with side-chain is involved in lactam formation
  MOD_RES (14)..(14): Lys with side-chain is involved in lactam formation
  C-term NH2
XIWIAQELRDIGDKFNAYYARR

SEQ ID NO: 469 - protein, 22 aa, Artificial Sequence
  Description of Artificial Sequence: Synthetic peptide
  N-term 5-FAM
  MOD_RES (1)..(1): 6-aminohexanoic acid
  MOD_RES (10)..(10): Alpha-H S5-pentenyl-alanine olefin amino acid connected by an all-carbon crosslinker comprising one double bond
  MISC_FEATURE (10)..(14): Crosslink between residues
  MOD_RES (14)..(14): Alpha-H S5-pentenyl-alanine olefin amino acid connected by an all-carbon crosslinker comprising one double bond
  C-term NH2
XIWIAQELRAIGDAFNAYYARR

SEQ ID NO: 470 - protein, 22 aa, Artificial Sequence
  Description of Artificial Sequence: Synthetic peptide
  N-term 5-FAM
  MOD_RES (1)..(1): 6-aminohexanoic acid
  MOD_RES (10)..(10): Cysteine thioether ortho-xylene
  MOD_RES (14)..(14): Cysteine thioether ortho-xylene
  C-term NH2
XIWIAQELRCIGDCFNAYYARR

SEQ ID NO: 471 - protein, 22 aa, Artificial Sequence
  Description of Artificial Sequence: Synthetic peptide
  N-term 5-FAM
  MOD_RES (1)..(1): 6-aminohexanoic acid
  MOD_RES (10)..(10): Alpha-Me S5-pentenyl-alanine olefin amino acid connected by an all-carbon crosslinker comprising one double bond
  MISC_FEATURE (10)..(14): Crosslink between residues
  MOD_RES (14)..(14): Alpha-Me S5-pentenyl-alanine olefin amino acid connected by an all-carbon crosslinker comprising one double bond
  C-term NH2
XRWIAQALRAIGDAFNAFYAHR

SEQ ID NO: 472 - protein, 22 aa, Artificial Sequence
  Description of Artificial Sequence: Synthetic peptide
  N-term 5-FAM
  MOD_RES (1)..(1): 6-aminohexanoic acid
  C-term NH2
XRWIAQALRRIGDEFNAFYAHR

SEQ ID NO: 473 - protein, 22 aa, Artificial Sequence
  Description of Artificial Sequence: Synthetic peptide
  N-term 5-FAM
  MOD_RES (1)..(1): 6-aminohexanoic acid
  MOD_RES (10)..(10): Alpha-Me S5-pentenyl-alanine olefin amino acid connected by an all-carbon crosslinker comprising one double bond
  MISC_FEATURE (10)..(14): Crosslink between residues
  MOD_RES (14)..(14): Alpha-Me S5-pentenyl-alanine olefin amino acid connected by an all-carbon crosslinker comprising one double bond
  C-term NH2
XRWIAQALRAIGDAFNAFYARH

SEQ ID NO: 474 - protein, 22 aa, Artificial Sequence
  Description of Artificial Sequence: Synthetic peptide
  N-term 5-FAM
  MOD_RES (1)..(1): 6-aminohexanoic acid
  C-term NH2
XRWIAQALRRIGDEFNAFYARH

SEQ ID NO: 475 - protein, 21 aa, Artificial Sequence
  Description of Artificial Sequence: Synthetic peptide
  N-term Ac
  MOD_RES (9)..(9): Alpha-Me S5-pentenyl-alanine olefin amino acid connected by an all-carbon crosslinker comprising one double bond
  MISC_FEATURE (9)..(13): Crosslink between residues
  MOD_RES (13)..(13): Alpha-Me S5-pentenyl-alanine olefin amino acid connected by an all-carbon crosslinker comprising one double bond
  C-term NH2
RWIAQALRAIGDAFNAFYAAR

SEQ ID NO: 476 - protein, 21 aa, Artificial Sequence
  Description of Artificial Sequence: Synthetic peptide
  N-term Ac
  MOD_RES (9)..(9): Alpha-Me S5-pentenyl-alanine olefin amino acid connected by an all-carbon crosslinker comprising one double bond
  MISC_FEATURE (9)..(13): Crosslink between residues
  MOD_RES (13)..(13): Alpha-Me S5-pentenyl-alanine olefin amino acid connected by an all-carbon crosslinker comprising one double bond
  C-term NH2
RWIAQALRAIGDAFNAFYARA

SEQ ID NO: 477 - protein, 21 aa, Artificial Sequence
  Description of Artificial Sequence: Synthetic peptide
  N-term Ac
  MOD_RES (9)..(9): Alpha-Me S5-pentenyl-alanine olefin amino acid connected by an all-carbon crosslinker comprising one double bond
  MISC_FEATURE (9)..(13): Crosslink between residues
  MOD_RES (13)..(13): Alpha-Me S5-pentenyl-alanine olefin amino acid connected by an all-carbon crosslinker comprising one double bond
  C-term NH2
RWIAQAARADIGAANAFYARR

SEQ ID NO: 478 - protein, 21 aa, Artificial Sequence
  Description of Artificial Sequence: Synthetic peptide
  N-term Ac
  MOD_RES (9)..(9): Alpha-Me S5-pentenyl-alanine olefin amino acid connected by an all-carbon crosslinker comprising one double bond
  MISC_FEATURE (9)..(13): Crosslink between residues
  MOD_RES (13)..(13): Alpha-Me S5-pentenyl-alanine olefin amino acid connected by an all-carbon crosslinker comprising one double bond
  C-term NH2
IWIAQAARADIGAANAFYARR

SEQ ID NO: 479 - protein, 22 aa, Artificial Sequence
  Description of Artificial Sequence: Synthetic peptide
  N-term 5-FAM
  MOD_RES (1)..(1): 6-aminohexanoic acid
  MOD_RES (10)..(10): Alpha-Me S5-pentenyl-alanine olefin amino acid connected by an all-carbon crosslinker comprising one double bond
  MISC_FEATURE (10)..(14): Crosslink between residues
  MOD_RES (14)..(14): Alpha-Me S5-pentenyl-alanine olefin amino acid connected by an all-carbon crosslinker comprising one double bond
  C-term NH2
XIWIAQELRAIEDAFNAYYARR

SEQ ID NO: 480 - protein, 22 aa, Artificial Sequence
  Description of Artificial Sequence: Synthetic peptide
  N-term 5-FAM
  MOD_RES (1)..(1): 6-aminohexanoic acid
  C-term NH2
XIWIAQELRRIEDEFNAYYARR

SEQ ID NO: 481 - protein, 21 aa, Artificial Sequence
  Description of Artificial Sequence: Synthetic peptide
  N-term Ac
  MOD_RES (9)..(9): Norleucine
  MOD_RES (13)..(13): Norleucine
  C-term NH2
IWIAQELRLIGDLFNAYYARR

SEQ ID NO: 482 - protein, 21 aa, Artificial Sequence
  Description of Artificial Sequence: Synthetic peptide
  N-term Ac
  MOD_RES (9)..(9): 2-aminoisobutyric acid
  MOD_RES (13)..(13): 2-aminoisobutyric acid
  C-term NH2
IWIAQELRXIGDXFNAYYARR

SEQ ID NO: 483 - protein, 22 aa, Artificial Sequence
  Description of Artificial Sequence: Synthetic peptide
  N-term 5-FAM
  MOD_RES (1)..(1): 6-aminohexanoic acid
  MOD_RES (10)..(10): Alpha-Me S5-pentenyl-alanine olefin amino acid connected by an all-carbon crosslinker comprising one double bond
  MISC_FEATURE (10)..(14): Crosslink between residues
  MOD_RES (14)..(14): Alpha-Me S5-pentenyl-alanine olefin amino acid connected by an all-carbon crosslinker comprising one double bond
  C-term NH2
XRWIAQALRAIGDAFNAFYARR

SEQ ID NO: 484 - protein, 22 aa, Artificial Sequence
  Description of Artificial Sequence: Synthetic peptide
  N-term 5-FAM
  MOD_RES (1)..(1): 6-aminohexanoic acid
  C-term NH2
XRWIAQALRRIGDEFNAFYARR

SEQ ID NO: 485 - protein, 23 aa, Artificial Sequence
  Description of Artificial Sequence: Synthetic peptide
  N-term H
  MOD_RES (2)..(2): 6-aminohexanoic acid
  MOD_RES (11)..(11): Alpha-Me S5-pentenyl-alanine olefin amino acid connected by an all-carbon crosslinker comprising one double bond
  MISC_FEATURE (11)..(15): Crosslink between residues
  MOD_RES (15)..(15): Alpha-Me S5-pentenyl-alanine olefin amino acid connected by an all-carbon crosslinker comprising one double bond
  C-term NH2
CXIWIAQALRAIGDAFNAFYARR

SEQ ID NO: 486 - protein, 23 aa, Artificial Sequence
  Description of Artificial Sequence: Synthetic peptide
  N-term H
  MOD_RES (2)..(2): 6-aminohexanoic acid
  MOD_RES (11)..(11): Alpha-Me S5-pentenyl-alanine olefin amino acid connected by an all-carbon crosslinker comprising one double bond
  MISC_FEATURE (11)..(15): Crosslink between residues
  MOD_RES (15)..(15): Alpha-Me S5-pentenyl-alanine olefin amino acid connected by an all-carbon crosslinker comprising one double bond
  C-term NH2
CXRWIAQALRAIGDAFNAFYARR

SEQ ID NO: 487 - protein, 22 aa, Artificial Sequence
  Description of Artificial Sequence: Synthetic peptide
  N-term 5-FAM
  MOD_RES (1)..(1): 6-aminohexanoic acid
  MOD_RES (10)..(10): Alpha-Me S5-pentenyl-alanine olefin amino acid connected by an all-carbon crosslinker comprising one double bond
  MISC_FEATURE (10)..(14): Crosslink between residues
  MOD_RES (14)..(14): Alpha-Me S5-pentenyl-alanine olefin amino acid connected by an all-carbon crosslinker comprising one double bond
  C-term NH2
XIWIAQALRAIGDAFNAFYARR

SEQ ID NO: 488 - protein, 23 aa, Artificial Sequence
  Description of Artificial Sequence: Synthetic peptide
  N-term OVA
  MOD_RES (2)..(2): 6-aminohexanoic acid
  MOD_RES (11)..(11): Alpha-Me S5-pentenyl-alanine olefin amino acid connected by an all-carbon crosslinker comprising one double bond
  MISC_FEATURE (11)..(15): Crosslink between residues
  MOD_RES (15)..(15): Alpha-Me S5-pentenyl-alanine olefin amino acid connected by an all-carbon crosslinker comprising one double bond
  C-term NH2
CXIWIAQELRAIGDAFNAYYARR

SEQ ID NO: 489 - protein, 23 aa, Artificial Sequence
  Description of Artificial Sequence: Synthetic peptide
  N-term OVA
  MOD_RES (2)..(2): 6-aminohexanoic acid
  MOD_RES (11)..(11): Alpha-Me S5-pentenyl-alanine olefin amino acid connected by an all-carbon crosslinker comprising one double bond
  MISC_FEATURE (11)..(15): Crosslink between residues
  MOD_RES (15)..(15): Alpha-Me S5-pentenyl-alanine olefin amino acid connected by an all-carbon crosslinker comprising one double bond
  C-term NH2
CXRWIAQQLRAIGDAFNAYYARR

SEQ ID NO: 490 - protein, 23 aa, Artificial Sequence
  Description of Artificial Sequence: Synthetic peptide
  N-term H
  MOD_RES (2)..(2): 6-aminohexanoic acid
  MOD_RES (11)..(11): Alpha-Me S5-pentenyl-alanine olefin amino acid connected by an all-carbon crosslinker comprising one double bond
  MISC_FEATURE (11)..(15): Crosslink between residues
  MOD_RES (15)..(15): Alpha-Me S5-pentenyl-alanine olefin amino acid connected by an all-carbon crosslinker comprising one double bond
  C-term NH2
CXRWIAQAARAIGRAANAFYARR

SEQ ID NO: 491 - protein, 23 aa, Artificial Sequence
  Description of Artificial Sequence: Synthetic peptide
  N-term H
  MOD_RES (2)..(2): 6-aminohexanoic acid
  MOD_RES (11)..(11): Alpha-Me S5-pentenyl-alanine olefin amino acid connected by an all-carbon crosslinker comprising one double bond
  MISC_FEATURE (11)..(15): Crosslink between residues
  MOD_RES (15)..(15): Alpha-Me S5-pentenyl-alanine olefin amino acid connected by an all-carbon crosslinker comprising one double bond
  C-term NH2
CXRWIAQALRAIGDAFNAYYARR

SEQ ID NO: 492 - protein, 23 aa, Artificial Sequence
  Description of Artificial Sequence: Synthetic peptide
  N-term H
  MOD_RES (2)..(2): 6-aminohexanoic acid
  C-term NH2
CXIWIAQALRRIGDEFNAYYARR

SEQ ID NO: 493 - protein, 23 aa, Artificial Sequence
  Description of Artificial Sequence: Synthetic peptide
  N-term OVA
  MOD_RES (2)..(2): 6-aminohexanoic acid
  MOD_RES (11)..(11): Alpha-Me S5-pentenyl-alanine olefin amino acid connected by an all-carbon crosslinker comprising one double bond
  MISC_FEATURE (11)..(15): Crosslink between residues
  MOD_RES (15)..(15): Alpha-Me S5-pentenyl-alanine olefin amino acid connected by an all-carbon crosslinker comprising one double bond
  C-term NH2
CXRWIAQAARAIGDAANAYYARR

SEQ ID NO: 494 - protein, 23 aa, Artificial Sequence
  Description of Artificial Sequence: Synthetic peptide
  N-term OVA
  MOD_RES (2)..(2): 6-aminohexanoic acid
  MOD_RES (11)..(11): Alpha-Me S5-pentenyl-alanine olefin amino acid connected by an all-carbon crosslinker comprising one double bond
  MISC_FEATURE (11)..(15): Crosslink between residues
  MOD_RES (15)..(15): Alpha-Me S5-pentenyl-alanine olefin amino acid connected by an all-carbon crosslinker comprising one double bond
  C-term NH2
CXRWIAQALRAIGDAFNAYYARR

SEQ ID NO: 495 - protein, 23 aa, Artificial Sequence
  Description of Artificial Sequence: Synthetic peptide
  N-term OVA
  MOD_RES (2)..(2): 6-aminohexanoic acid
  C-term NH2
CXIWIAQALRRIGDEFNAYYARR

SEQ ID NO: 496 - protein, 28 aa, Artificial Sequence
  Description of Artificial Sequence: Synthetic peptide
  N-term Ac
  MOD_RES (7)..(7): 6-aminohexanoic acid
  MOD_RES (16)..(16): Alpha-Me S5-pentenyl-alanine olefin amino acid connected by an all-carbon crosslinker comprising one double bond
  MISC_FEATURE (16)..(20): Crosslink between residues
  MOD_RES (20)..(20): Alpha-Me S5-pentenyl-alanine olefin amino acid connected by an all-carbon crosslinker comprising one double bond
  C-term NH2
HHHHHHXIWIAQAARADIGAANAYYARR

SEQ ID NO: 497 - protein, 22 aa, Artificial Sequence
  Description of Artificial Sequence: Synthetic peptide
  N-term Ac-Flag
  MOD_RES (1)..(1): 6-aminohexanoic acid
  MOD_RES (10)..(10): Alpha-Me S5-pentenyl-alanine olefin amino acid connected by an all-carbon crosslinker comprising one double bond
  MISC_FEATURE (10)..(14): Crosslink between residues
  MOD_RES (14)..(14): Alpha-Me S5-pentenyl-alanine olefin amino acid connected by an all-carbon crosslinker comprising one double bond
  C-term NH2
XIWIAQAARADIGAANAYYARR

SEQ ID NO: 498 - protein, 28 aa, Artificial Sequence
  Description of Artificial Sequence: Synthetic peptide
  N-term 5-FAM
  MOD_RES (7)..(7): 6-aminohexanoic acid
  MOD_RES (16)..(16): Alpha-Me S5-pentenyl-alanine olefin amino acid connected by an all-carbon crosslinker comprising one double bond
  MISC_FEATURE (16)..(20): Crosslink between residues
  MOD_RES (20)..(20): Alpha-Me S5-pentenyl-alanine olefin amino acid connected by an all-carbon crosslinker comprising one double bond
  C-term NH2
HHHHHHXIWIAQAARADIGAANAYYARR

SEQ ID NO: 499 - protein, 22 aa, Artificial Sequence
  Description of Artificial Sequence: Synthetic peptide
  N-term 5-FAM-Flag
  MOD_RES (1)..(1): 6-aminohexanoic acid
  MOD_RES (10)..(10): Alpha-Me S5-pentenyl-alanine olefin amino acid connected by an all-carbon crosslinker comprising one double bond
  MISC_FEATURE (10)..(14): Crosslink between residues
  MOD_RES (14)..(14): Alpha-Me S5-pentenyl-alanine olefin amino acid connected by an all-carbon crosslinker comprising one double bond
  C-term NH2
XIWIAQAARADIGAANAYYARR

SEQ ID NO: 500 - protein, 28 aa, Artificial Sequence
  Description of Artificial Sequence: Synthetic peptide
  N-term Ac
  MOD_RES (7)..(7): 6-aminohexanoic acid
  MOD_RES (16)..(16): Alpha-Me S5-pentenyl-alanine olefin amino acid connected by an all-carbon crosslinker comprising one double bond
  MISC_FEATURE (16)..(20): Crosslink between residues
  MOD_RES (20)..(20): Alpha-Me S5-pentenyl-alanine olefin amino acid connected by an all-carbon crosslinker comprising one double bond
  C-term NH2
HHHHHHXRWIAQALRAIGDAFNAFYARR

SEQ ID NO: 501 - protein, 22 aa, Artificial Sequence
  Description of Artificial Sequence: Synthetic peptide
  N-term Ac-Flag
  MOD_RES (1)..(1): 6-aminohexanoic acid
  MOD_RES (10)..(10): Alpha-Me S5-pentenyl-alanine olefin amino acid connected by an all-carbon crosslinker comprising one double bond
  MISC_FEATURE (10)..(14): Crosslink between residues
  MOD_RES (14)..(14): Alpha-Me S5-pentenyl-alanine olefin amino acid connected by an all-carbon crosslinker comprising one double bond
  C-term NH2
XRWIAQALRAIGDAFNAFYARR

SEQ ID NO: 502 - protein, 28 aa, Artificial Sequence
  Description of Artificial Sequence: Synthetic peptide
  N-term 5-FAM
  MOD_RES (7)..(7): 6-aminohexanoic acid
  MOD_RES (16)..(16): Alpha-Me S5-pentenyl-alanine olefin amino acid connected by an all-carbon crosslinker comprising one double bond
  MISC_FEATURE (16)..(20): Crosslink between residues
  MOD_RES (20)..(20): Alpha-Me S5-pentenyl-alanine olefin amino acid connected by an all-carbon crosslinker comprising one double bond
  C-term NH2
HHHHHHXRWIAQALRAIGDAFNAFYARR

SEQ ID NO: 503 - protein, 22 aa, Artificial Sequence
  Description of Artificial Sequence: Synthetic peptide
  N-term 5-FAM-Flag
  MOD_RES (1)..(1): 6-aminohexanoic acid
  MOD_RES (10)..(10): Alpha-Me S5-pentenyl-alanine olefin amino acid connected by an all-carbon crosslinker comprising one double bond
  MISC_FEATURE (10)..(14): Crosslink between residues
  MOD_RES (14)..(14): Alpha-Me S5-pentenyl-alanine olefin amino acid connected by an all-carbon crosslinker comprising one double bond
  C-term NH2
XRWIAQALRAIGDAFNAFYARR

SEQ ID NO: 504 - protein, 21 aa, Artificial Sequence
  Description of Artificial Sequence: Synthetic peptide
  N-term 5-FAM
  MOD_RES (9)..(9): Alpha-Me S5-pentenyl-alanine olefin amino acid connected by an all-carbon crosslinker comprising one double bond
  MISC_FEATURE (9)..(13): Crosslink between residues
  MOD_RES (13)..(13): Alpha-Me S5-pentenyl-alanine olefin amino acid connected by an all-carbon crosslinker comprising one double bond
  C-term NH2
IWIAQELRAIGDAFNAYYARR

SEQ ID NO: 505 - protein, 22 aa, Artificial Sequence
  Description of Artificial Sequence: Synthetic peptide
  N-term 5-FAM
  MOD_RES (1)..(1): Beta-Ala
  MOD_RES (10)..(10): Alpha-Me S5-pentenyl-alanine olefin amino acid connected by an all-carbon crosslinker comprising one double bond
  MISC_FEATURE (10)..(14): Crosslink between residues
  MOD_RES (14)..(14): Alpha-Me S5-pentenyl-alanine olefin amino acid connected by an all-carbon crosslinker comprising one double bond
  C-term NH2
AIWIAQELRAIGDAFNAYYARR

SEQ ID NO: 506 - protein, 21 aa, Artificial Sequence
  Description of Artificial Sequence: Synthetic peptide
  N-term Ac
  MOD_RES (9)..(9): Alpha-Me S5-pentenyl-alanine olefin amino acid cyclized and then 1,3-dioxolan-2-one olefin hydroxylated
  MISC_FEATURE (9)..(13): Crosslink between residues
  MOD_RES (13)..(13): Alpha-Me S5-pentenyl-alanine olefin amino acid cyclized and then 1,3-dioxolan-2-one olefin hydroxylated
  C-term NH2
IWIAQELRAIGDAFNAYYARR

SEQ ID NO: 507 - protein, 22 aa, Artificial Sequence
  Description of Artificial Sequence: Synthetic peptide
  N-term Ac
  MOD_RES (1)..(1): 6-aminohexanoic acid
  MOD_RES (10)..(10): Alpha-Me S5-pentenyl-alanine olefin amino acid connected by an all-carbon crosslinker comprising one double bond
  MISC_FEATURE (10)..(14): Crosslink between residues
  MOD_RES (14)..(14): Alpha-Me S5-pentenyl-alanine olefin amino acid connected by an all-carbon crosslinker comprising one double bond
  C-term NH2
XIWIAQELRAIGDAFNAYYARR

SEQ ID NO: 508 - protein, 22 aa, Artificial Sequence
  Description of Artificial Sequence: Synthetic peptide
  N-term Ac
  MOD_RES (1)..(1): Beta-Ala
  MOD_RES (10)..(10): Alpha-Me S5-pentenyl-alanine olefin amino acid connected by an all-carbon crosslinker comprising one double bond
  MISC_FEATURE (10)..(14): Crosslink between residues
  MOD_RES (14)..(14): Alpha-Me S5-pentenyl-alanine olefin amino acid connected by an all-carbon crosslinker comprising one double bond
  C-term NH2
AIWIAQELRAIGDAFNAYYARR

SEQ ID NO: 509 - protein, 23 aa, Artificial Sequence
  Description of Artificial Sequence: Synthetic peptide
  N-term H
  MOD_RES (2)..(2): 6-aminohexanoic acid
  MOD_RES (11)..(11): Alpha-Me S5-pentenyl-alanine olefin amino acid connected by an all-carbon crosslinker comprising one double bond
  MISC_FEATURE (11)..(15): Crosslink between residues
  MOD_RES (15)..(15): Alpha-Me S5-pentenyl-alanine olefin amino acid connected by an all-carbon crosslinker comprising one double bond
  C-term NH2
CXIWIAQALRAIGDAFNAYYARR

SEQ ID NO: 510 - protein, 22 aa, Artificial Sequence
  Description of Artificial Sequence: Synthetic peptide
  N-term 5-FAM
  MOD_RES (1)..(1): 6-aminohexanoic acid
  MOD_RES (10)..(10): Alpha-Me S5-pentenyl-alanine olefin amino acid not connected by any crosslinker
  MOD_RES (14)..(14): Alpha-Me S5-pentenyl-alanine olefin amino acid not connected by any crosslinker
  C-term NH2
XIWIAQELRAIGDAFNAYYARR

SEQ ID NO: 511 - protein, 21 aa, Artificial Sequence
  Description of Artificial Sequence: Synthetic peptide
  N-term Ac
  C-term NH2
RWIAQALRRIGDEFNAFYAHH

SEQ ID NO: 512 - protein, 22 aa, Artificial Sequence
  Description of Artificial Sequence: Synthetic peptide
  N-term 5-FAM
  MOD_RES (1)..(1): 6-aminohexanoic acid
  MOD_RES (10)..(10): Alpha-Me S5-pentenyl-alanine olefin amino acid connected by an all-carbon crosslinker comprising one double bond
  MISC_FEATURE (10)..(14): Crosslink between residues
  MOD_RES (14)..(14): Alpha-Me S5-pentenyl-alanine olefin amino acid connected by an all-carbon crosslinker comprising one double bond
  C-term NH2
XRWIAQALRAIGDAFNAFYAHH

SEQ ID NO: 513 - protein, 22 aa, Artificial Sequence
  Description of Artificial Sequence: Synthetic peptide
  N-term 5-FAM
  MOD_RES (1)..(1): 6-aminohexanoic acid
  C-term NH2
XIWIAQELRRIGDEFNAYYARR

SEQ ID NO: 514 - protein, 22 aa, Artificial Sequence
  Description of Artificial Sequence: Synthetic peptide
  N-term Ac-Tat
  MOD_RES (1)..(1): 6-aminohexanoic acid
  C-term NH2
XIWIAQELRRIGDEFNAYYARR

SEQ ID NO: 515 - protein, 22 aa, Artificial Sequence
  Description of Artificial Sequence: Synthetic peptide
  N-term 5-FAM-Tat
  MOD_RES (1)..(1): 6-aminohexanoic acid
  C-term NH2
XIWIAQELRRIGDEFNAYYARR

SEQ ID NO: 516 - protein, 22 aa, Artificial Sequence
  Description of Artificial Sequence: Synthetic peptide
  N-term Ac-Tat
  MOD_RES (1)..(1): 6-aminohexanoic acid
  MOD_RES (10)..(10): Alpha-Me S5-pentenyl-alanine olefin amino acid connected by an all-carbon crosslinker comprising one double bond
  MISC_FEATURE (10)..(14): Crosslink between residues
  MOD_RES (14)..(14): Alpha-Me S5-pentenyl-alanine olefin amino acid connected by an all-carbon crosslinker comprising one double bond
  C-term NH2
XIWIAQELRAIGDAFNAYYARR

SEQ ID NO: 517 - protein, 22 aa, Artificial Sequence
  Description of Artificial Sequence: Synthetic peptide
  N-term 5-FAM-Tat
  MOD_RES (1)..(1): 6-aminohexanoic acid
  MOD_RES (10)..(10): Alpha-Me S5-pentenyl-alanine olefin amino acid connected by an all-carbon crosslinker comprising one double bond
  MISC_FEATURE (10)..(14): Crosslink between residues
  MOD_RES (14)..(14): Alpha-Me S5-pentenyl-alanine olefin amino acid connected by an all-carbon crosslinker comprising one double bond
  C-term NH2
XIWIAQELRAIGDAFNAYYARR

SEQ ID NO: 518 - protein, 22 aa, Artificial Sequence
  Description of Artificial Sequence: Synthetic peptide
  N-term Ac-Tat
  MOD_RES (1)..(1): 6-aminohexanoic acid
  MOD_RES (10)..(10): Alpha-Me S5-pentenyl-alanine olefin amino acid connected by an all-carbon crosslinker comprising one double bond
  MISC_FEATURE (10)..(14): Crosslink between residues
  MOD_RES (14)..(14): Alpha-Me S5-pentenyl-alanine olefin amino acid connected by an all-carbon crosslinker comprising one double bond
  C-term NH2
XRWIAQALRAIGDAFNAFYARR

SEQ ID NO: 519 - protein, 22 aa, Artificial Sequence
  Description of Artificial Sequence: Synthetic peptide
  N-term 5-FAM-Tat
  MOD_RES (1)..(1): 6-aminohexanoic acid
  MOD_RES (10)..(10): Alpha-Me S5-pentenyl-alanine olefin amino acid connected by an all-carbon crosslinker comprising one double bond
  MISC_FEATURE (10)..(14): Crosslink between residues
  MOD_RES (14)..(14): Alpha-Me S5-pentenyl-alanine olefin amino acid connected by an all-carbon crosslinker comprising one double bond
  C-term NH2
XRWIAQALRAIGDAFNAFYARR

SEQ ID NO: 520 - protein, 22 aa, Artificial Sequence
  Description of Artificial Sequence: Synthetic peptide
  N-term Ac-Tat
  MOD_RES (1)..(1): 6-aminohexanoic acid
  C-term NH2
XRWIAQALRRIGDEFNAFYARR

SEQ ID NO: 521 - protein, 22 aa, Artificial Sequence
  Description of Artificial Sequence: Synthetic peptide
  N-term 5-FAM-Tat
  MOD_RES (1)..(1): 6-aminohexanoic acid
  C-term NH2
XRWIAQALRRIGDEFNAFYARR

SEQ ID NO: 522 - protein, 22 aa, Artificial Sequence
  Description of Artificial Sequence: Synthetic peptide
  N-term 5-FAM
  MOD_RES (1)..(1): 6-aminohexanoic acid
  MOD_RES (10)..(10): Alpha-Me S5-pentenyl-alanine olefin amino acid not connected by any crosslinker
  MOD_RES (14)..(14): Alpha-Me S5-pentenyl-alanine olefin amino acid not connected by any crosslinker
  C-term NH2
XRWIAQALRAIGDAFNAFYARR

SEQ ID NO: 523 - protein, 22 aa, Artificial Sequence
  Description of Artificial Sequence: Synthetic peptide
  N-term 5-FAM
  MOD_RES (1)..(1): 6-aminohexanoic acid
  MOD_RES (10)..(10): Alpha-Me S5-pentenyl-alanine olefin amino acid not connected by any crosslinker
  MOD_RES (14)..(14): Alpha-Me S5-pentenyl-alanine olefin amino acid not connected by any crosslinker
  C-term NH2
XIWIAQALRAIGDAFNAFYARR

SEQ ID NO: 524 - protein, 22 aa, Artificial Sequence
  Description of Artificial Sequence: Synthetic peptide
  N-term Ac-Tat
  MOD_RES (1)..(1): 6-aminohexanoic acid
  MOD_RES (10)..(10): Alpha-Me S5-pentenyl-alanine olefin amino acid connected by an all-carbon crosslinker comprising one double bond
  MISC_FEATURE (10)..(14): Crosslink between residues
  MOD_RES (14)..(14): Alpha-Me S5-pentenyl-alanine olefin amino acid connected by an all-carbon crosslinker comprising one double bond
  C-term NH2
XIWIAQELRAIEDAFNAYYARR

SEQ ID NO: 525 - protein, 22 aa, Artificial Sequence
  Description of Artificial Sequence: Synthetic peptide
  N-term 5-FAM-Tat
  MOD_RES (1)..(1): 6-aminohexanoic acid
  MOD_RES (10)..(10): Alpha-Me S5-pentenyl-alanine olefin amino acid connected by an all-carbon crosslinker comprising one double bond
  MISC_FEATURE (10)..(14): Crosslink between residues
  MOD_RES (14)..(14): Alpha-Me S5-pentenyl-alanine olefin amino acid connected by an all-carbon crosslinker comprising one double bond
  C-term NH2
XIWIAQELRAIEDAFNAYYARR

SEQ ID NO: 526 - protein, 21 aa, Artificial Sequence
  Description of Artificial Sequence: Synthetic peptide
  N-term Ac
  C-term NH2
IWIAQELRRIEDDFNAYYARR

SEQ ID NO: 527 - protein, 22 aa, Artificial Sequence
  Description of Artificial Sequence: Synthetic peptide
  N-term Ac-Tat
  MOD_RES (1)..(1): 6-aminohexanoic acid
  C-term NH2
XIWIAQELRRIEDDFNAYYARR

SEQ ID NO: 528 - protein, 22 aa, Artificial Sequence
  Description of Artificial Sequence: Synthetic peptide
  N-term 5-FAM-Tat
  MOD_RES (1)..(1): 6-aminohexanoic acid
  C-term NH2
XIWIAQELRRIEDDFNAYYARR

SEQ ID NO: 529 - protein, 21 aa, Artificial Sequence
  Description of Artificial Sequence: Synthetic peptide
  N-term Ac
  MOD_RES (9)..(9): Alpha-Me S5-pentenyl-alanine olefin amino acid not connected by any crosslinker
  MOD_RES (13)..(13): Alpha-Me S5-pentenyl-alanine olefin amino acid not connected by any crosslinker
  C-term NH2
IWIAQELRAIEDAFNAYYARR

SEQ ID NO: 530 - protein, 22 aa, Artificial Sequence
  Description of Artificial Sequence: Synthetic peptide
  N-term 5-FAM
  MOD_RES (1)..(1): 6-aminohexanoic acid
  MOD_RES (10)..(10): Alpha-Me S5-pentenyl-alanine olefin amino acid not connected by any crosslinker
  MOD_RES (14)..(14): Alpha-Me S5-pentenyl-alanine olefin amino acid not connected by any crosslinker
  C-term NH2
XIWIAQELRAIEDAFNAYYARR

SEQ ID NO: 531 - protein, 22 aa, Artificial Sequence
  Description of Artificial Sequence: Synthetic peptide
  N-term 5-FAM
  MOD_RES (1)..(1): 6-aminohexanoic acid
  MOD_RES (10)..(10): Alpha-Me S5-pentenyl-alanine olefin amino acid connected by an all-carbon crosslinker comprising one double bond
  MISC_FEATURE (10)..(14): Crosslink between residues
  MOD_RES (14)..(14): Alpha-Me S5-pentenyl-alanine olefin amino acid connected by an all-carbon crosslinker comprising one double bond
  C-term NH2
XIWIAQAARADIGAANAYYARR

SEQ ID NO: 532 - protein, 22 aa, Artificial Sequence
  Description of Artificial Sequence: Synthetic peptide
  N-term Ac-Tat
  MOD_RES (1)..(1): 6-aminohexanoic acid
  MOD_RES (10)..(10): Alpha-Me S5-pentenyl-alanine olefin amino acid connected by an all-carbon crosslinker comprising one double bond
  MISC_FEATURE (10)..(14): Crosslink between residues
  MOD_RES (14)..(14): Alpha-Me S5-pentenyl-alanine olefin amino acid connected by an all-carbon crosslinker comprising one double bond
  C-term NH2
XIWIAQAARADIGAANAYYARR

SEQ ID NO: 533 - protein, 22 aa, Artificial Sequence
  Description of Artificial Sequence: Synthetic peptide
  N-term 5-FAM-Tat
  MOD_RES (1)..(1): 6-aminohexanoic acid
  MOD_RES (10)..(10): Alpha-Me S5-pentenyl-alanine olefin amino acid connected by an all-carbon crosslinker comprising one double bond
  MISC_FEATURE (10)..(14): Crosslink between residues
  MOD_RES (14)..(14): Alpha-Me S5-pentenyl-alanine olefin amino acid connected by an all-carbon crosslinker comprising one double bond
  C-term NH2
XIWIAQAARADIGAANAYYARR

SEQ ID NO: 534 - protein, 21 aa, Artificial Sequence
  Description of Artificial Sequence: Synthetic peptide
  N-term Ac
  C-term NH2
IWIAQAARRDIGEANAYYARR

SEQ ID NO: 535 - protein, 22 aa, Artificial Sequence
  Description of Artificial Sequence: Synthetic peptide
  N-term Ac-Tat
  MOD_RES (1)..(1): 6-aminohexanoic acid
  C-term NH2
XIWIAQAARRDIGEANAYYARR

SEQ ID NO: 536 - protein, 22 aa, Artificial Sequence
  Description of Artificial Sequence: Synthetic peptide
  N-term 5-FAM-Tat
  MOD_RES (1)..(1): 6-aminohexanoic acid
  C-term NH2
XIWIAQAARRDIGEANAYYARR

SEQ ID NO: 537 - protein, 21 aa, Artificial Sequence
  Description of Artificial Sequence: Synthetic peptide
  N-term Ac
  MOD_RES (9)..(9): Alpha-Me S5-pentenyl-alanine olefin amino acid connected by an all-carbon crosslinker comprising one double bond
  MISC_FEATURE (9)..(13): Crosslink between residues
  MOD_RES (13)..(13): Alpha-Me S5-pentenyl-alanine olefin amino acid connected by an all-carbon crosslinker comprising one double bond
  C-term NH2
IWIAQAARADIGAANAYYARR

SEQ ID NO: 538 - protein, 22 aa, Artificial Sequence
  Description of Artificial Sequence: Synthetic peptide
  N-term 5-FAM
  MOD_RES (1)..(1): 6-aminohexanoic acid
  MOD_RES (10)..(10): Alpha-Me S5-pentenyl-alanine olefin amino acid not connected by any crosslinker
  MOD_RES (14)..(14): Alpha-Me S5-pentenyl-alanine olefin amino acid not connected by any crosslinker
  C-term NH2
XIWIAQAARADIGAANAYYARR

SEQ ID NO: 539 - protein, 21 aa, Artificial Sequence
  Description of Artificial Sequence: Synthetic peptide
  N-term Ac
  C-term NH2
IWIAQELRRIEDEFNAYYARR

SEQ ID NO: 540 - protein, 21 aa, Artificial Sequence
  Description of Artificial Sequence: Synthetic peptide
  N-term Ac
  MOD_RES (9)..(9): Alpha-Me S5-pentenyl-alanine olefin amino acid not connected by any crosslinker
  MOD_RES (13)..(13): Alpha-Me S5-pentenyl-alanine olefin amino acid not connected by any crosslinker
  C-term NH2
IWIAQALRAIGDAFNAFYARR

SEQ ID NO: 541 - protein, 21 aa, Artificial Sequence
  Description of Artificial Sequence: Synthetic peptide
  N-term Ac
  MOD_RES (9)..(9): Alpha-Me S5-pentenyl-alanine olefin amino acid connected by an all-carbon crosslinker comprising one double bond
  MISC_FEATURE (9)..(13): Crosslink between residues
  MOD_RES (13)..(13): Alpha-Me S5-pentenyl-alanine olefin amino acid connected by an all-carbon crosslinker comprising one double bond
  C-term NH2
RWIAQALRAIGDAFNAFYAHH

SEQ ID NO: 542 - protein, 22 aa, Artificial Sequence
  Description of Artificial Sequence: Synthetic peptide
  N-term Tat
  MOD_RES (1)..(1): 6-aminohexanoic acid
  C-term NH2
XIWIAQELRRIGDEFNAYYARR

SEQ ID NO: 543 - protein, 22 aa, Artificial Sequence
  Description of Artificial Sequence: Synthetic peptide
  N-term 5-FAM-Tat
  MOD_RES (1)..(1): 6-aminohexanoic acid
  C-term NH2
XIWIAQELRRIEDEFNAYYARR

SEQ ID NO: 544 - protein, 21 aa, Artificial Sequence
  Description of Artificial Sequence: Synthetic peptide
  N-term Ac
  MOD_RES (11)..(11): Alpha-Me S5-pentenyl-alanine olefin amino acid connected by an all-carbon crosslinker comprising one double bond
  MISC_FEATURE (11)..(15): Crosslink between residues
  MOD_RES (15)..(15): Alpha-Me S5-pentenyl-alanine olefin amino acid connected by an all-carbon crosslinker comprising one double bond
  C-term NH2
IWIAQALRRIADEFAAYYARR

SEQ ID NO: 545 - protein, 21 aa, Artificial Sequence
  Description of Artificial Sequence: Synthetic peptide
  N-term Ac
  MOD_RES (9)..(9): Alpha-Me R8-octenyl-alanine olefin amino acid connected by an all-carbon crosslinker comprising one double bond
  MISC_FEATURE (9)..(16): Crosslink between residues
  MOD_RES (16)..(16): Alpha-Me S5-pentenyl-alanine olefin amino acid connected by an all-carbon crosslinker comprising one double bond
  C-term NH2
IWIAQALRAIGDEFNAYYARR

SEQ ID NO: 546 - protein, 21 aa, Artificial Sequence
  Description of Artificial Sequence: Synthetic peptide
  N-term Ac
  C-term NH2
IWIAQELRRIEDEFNAYYARR

SEQ ID NO: 547 - protein, 21 aa, Artificial Sequence
  Description of Artificial Sequence: Synthetic peptide
  N-term Ac
  MOD_RES (9)..(9): Alpha-Me S5-pentenyl-alanine olefin amino acid not connected by any crosslinker
  MOD_RES (13)..(13): Alpha-Me S5-pentenyl-alanine olefin amino acid not connected by any crosslinker
  C-term NH2
IWIAQELRAIEDAFNAYYARR

SEQ ID NO: 548 - protein, 21 aa, Artificial Sequence
  Description of Artificial Sequence: Synthetic peptide
  N-term Ac
  C-term NH2
IWIAQAARRDIGEANAYYARR

SEQ ID NO: 549 - protein, 21 aa, Artificial Sequence
  Description of Artificial Sequence: Synthetic peptide
  N-term Ac
  MOD_RES (9)..(9): Alpha-Me S5-pentenyl-alanine olefin amino acid not connected by any crosslinker
  MOD_RES (13)..(13): Alpha-Me S5-pentenyl-alanine olefin amino acid not connected by any crosslinker
  C-term NH2
IWIAQAARADIGAANAYYARR

SEQ ID NO: 550 - protein, 21 aa, Artificial Sequence
  Description of Artificial Sequence: Synthetic peptide
  N-term Ac
  MOD_RES (9)..(9): Alpha-Me S5-pentenyl-alanine olefin amino acid not connected by any crosslinker
  MOD_RES (13)..(13): Alpha-Me S5-pentenyl-alanine olefin amino acid not connected by any crosslinker
  C-term NH2
IWIAQALRAIGDAFNAFYARR

SEQ ID NO: 551 - protein, 21 aa, Artificial Sequence
  Description of Artificial Sequence: Synthetic peptide
  N-term Ac
  MOD_RES (9)..(9): Alpha-Me S5-pentenyl-alanine olefin amino acid connected by an all-carbon crosslinker comprising one double bond
  MISC_FEATURE (9)..(13): Crosslink between residues
  MOD_RES (13)..(13): Alpha-Me S5-pentenyl-alanine olefin amino acid connected by an all-carbon crosslinker comprising one double bond
  C-term NH2
RWIAQALRAIGDAFNAFYAHH

SEQ ID NO: 552 - protein, 21 aa, Artificial Sequence
  Description of Artificial Sequence: Synthetic peptide
  N-term Ac
  C-term NH2
IWIAQALRRIGDEFNAFYARR

SEQ ID NO: 553 - protein, 22 aa, Artificial Sequence
  Description of Artificial Sequence: Synthetic peptide
  N-term 5-FAM
  MOD_RES (1)..(1): 6-aminohexanoic acid
  MOD_RES (10)..(10): Alpha-Me R8-octenyl-alanine olefin amino acid connected by an all-carbon crosslinker comprising one double bond
  MISC_FEATURE (10)..(17): Crosslink between residues
  MOD_RES (17)..(17): Alpha-Me S5-pentenyl-alanine olefin amino acid connected by an all-carbon crosslinker comprising one double bond
  C-term NH2
XIWIAQALRAIGDEFNAYYARR

SEQ ID NO: 554 - protein, 16 aa, Artificial Sequence
  Description of Artificial Sequence: Synthetic peptide
  N-term Ac
  MOD_RES (9)..(9): Alpha-Me S5-pentenyl-alanine olefin amino acid connected by an all-carbon crosslinker comprising one double bond
  MISC_FEATURE (9)..(13): Crosslink between residues
  MOD_RES (13)..(13): Alpha-Me S5-pentenyl-alanine olefin amino acid connected by an all-carbon crosslinker comprising one double bond
  C-term OH
RWIAQALRAIGDAFNA

SEQ ID NO: 555 - protein, 19 aa, Artificial Sequence
  Description of Artificial Sequence: Synthetic peptide
  N-term Ac
  MOD_RES (9)..(9): Alpha-Me S5-pentenyl-alanine olefin amino acid connected by an all-carbon crosslinker comprising one double bond
  MISC_FEATURE (9)..(13): Crosslink between residues
  MOD_RES (13)..(13): Alpha-Me S5-pentenyl-alanine olefin amino acid connected by an all-carbon crosslinker comprising one double bond
  C-term OH
RWIAQALRAIGDAFNAFYA

SEQ ID NO: 556 - protein, 17 aa, Artificial Sequence
  Description of Artificial Sequence: Synthetic peptide
  N-term Ac
  MOD_RES (9)..(9): Alpha-Me S5-pentenyl-alanine olefin amino acid connected by an all-carbon crosslinker comprising one double bond
  MISC_FEATURE (9)..(13): Crosslink between residues
  MOD_RES (13)..(13): Alpha-Me S5-pentenyl-alanine olefin amino acid connected by an all-carbon crosslinker comprising one double bond
  C-term OH
RWIAQALRAIGDAFNAF

SEQ ID NO: 557 - protein, 21 aa, Artificial Sequence
  Description of Artificial Sequence: Synthetic peptide
  N-term Ac
  MOD_RES (9)..(9): Alpha-Me S5-pentenyl-alanine olefin amino acid connected by an all-carbon crosslinker comprising one double bond
  MISC_FEATURE (9)..(13): Crosslink between residues
  MOD_RES (13)..(13): Alpha-Me S5-pentenyl-alanine olefin amino acid connected by an all-carbon crosslinker comprising one double bond
  MOD_RES (21)..(21): Alpha-methyl-L-Arg
  C-term NH2
RWIAQALRAIGDAFNAFYARR

SEQ ID NO: 558 - protein, 22 aa, Artificial Sequence
  Description of Artificial Sequence: Synthetic peptide
  N-term 5-FAM
  MOD_RES (1)..(1): 6-aminohexanoic acid
  MOD_RES (10)..(10): Alpha-Me R8-octenyl-alanine olefin amino acid not connected by any crosslinker
  MOD_RES (17)..(17): Alpha-Me S5-pentenyl-alanine olefin amino acid not connected by any crosslinker
  C-term NH2
XIWIAQALRAIGDEFNAYYARR

SEQ ID NO: 559 - protein, 21 aa, Artificial Sequence
  Description of Artificial Sequence: Synthetic peptide
  N-term Ac
  MOD_RES (9)..(9): Alpha-Me R8-octenyl-alanine olefin amino acid not connected by any crosslinker
  MOD_RES (16)..(16): Alpha-Me S5-pentenyl-alanine olefin amino acid not connected by any crosslinker
  C-term NH2
IWIAQALRAIGDEFNAYYARR

SEQ ID NO: 560 - protein, 23 aa, Artificial Sequence
  Description of Artificial Sequence: Synthetic peptide
  N-term OVA
  MOD_RES (2)..(2): 6-aminohexanoic acid
  MOD_RES (11)..(11): Alpha-Me S5-pentenyl-alanine olefin amino acid connected by an all-carbon crosslinker comprising one double bond
  MISC_FEATURE (11)..(15): Crosslink between residues
  MOD_RES (15)..(15): Alpha-Me S5-pentenyl-alanine olefin amino acid connected by an all-carbon crosslinker comprising one double bond
  C-term NH2
CXIWIAQALRAIGDAFNAYYARR

SEQ ID NO: 561 - protein, 21 aa, Artificial Sequence
  Description of Artificial Sequence: Synthetic peptide
  N-term Ac
  MOD_RES (5)..(5): Alpha-Me S5-pentenyl-alanine olefin amino acid connected by an all-carbon crosslinker comprising one double bond
  MISC_FEATURE (5)..(9): Crosslink between residues
  MOD_RES (9)..(9): Alpha-Me S5-pentenyl-alanine olefin amino acid connected by an all-carbon crosslinker comprising one double bond
  C-term NH2
IWIAAALRAIGDEFNAYYARR

SEQ ID NO: 562 - protein, 21 aa, Artificial Sequence
  Description of Artificial Sequence: Synthetic peptide
  N-term Ac
  MOD_RES (5)..(5): Alpha-Me S5-pentenyl-alanine olefin amino acid not connected by any crosslinker
  MOD_RES (9)..(9): Alpha-Me S5-pentenyl-alanine olefin amino acid not connected by any crosslinker
  C-term NH2
IWIAAALRAIGDEFNAYYARR

SEQ ID NO: 563 - protein, 22 aa, Artificial Sequence
  Description of Artificial Sequence: Synthetic peptide
  N-term 5-FAM
  MOD_RES (1)..(1): 6-aminohexanoic acid
  MOD_RES (6)..(6): Alpha-Me R5-pentenyl-alanine olefin amino acid not connected by any crosslinker
  MOD_RES (10)..(10): Amino acid comprising two pentenyl-alanine olefin side chains that are not crosslinked
  MOD_RES (14)..(14): Alpha-Me S5-pentenyl-alanine olefin amino acid not connected by any crosslinker
  C-term NH2
XIWIAAALRAIGDAFNAYYARR

SEQ ID NO: 564 - protein, 22 aa, Artificial Sequence
  Description of Artificial Sequence: Synthetic peptide
  N-term 5-FAM
  MOD_RES (1)..(1): 6-aminohexanoic acid
  MOD_RES (6)..(6): Alpha-Me S5-pentenyl-alanine olefin amino acid connected by an all-carbon crosslinker comprising one double bond
  MISC_FEATURE (6)..(10): Crosslink between residues
  MOD_RES (10)..(10): Two pentenyl-alanine olefin side chains, each of which is crosslinked to another amino acid as indicated
  MISC_FEATURE (10)..(17): Crosslink between residues
  MOD_RES (17)..(17): Alpha-Me S8-octenyl-alanine olefin amino acid connected by an all-carbon crosslinker comprising one double bond
  C-term NH2
XIWIAAALRAIGDEFNAYYARR

SEQ ID NO: 565 - protein, 19 aa, Artificial Sequence
  Description of Artificial Sequence: Synthetic peptide
  N-term heptenoic acid crosslinked with position 4 via an all-carbon crosslinker comprising one double bond
  MOD_RES (4)..(4): Alpha-Me S5-pentenyl-alanine olefin amino acid connected by an all-carbon crosslinker comprising one double bond
  MOD_RES (7)..(7): Alpha-Me S5-pentenyl-alanine olefin amino acid connected by an all-carbon crosslinker comprising one double bond
  MISC_FEATURE (7)..(11): Crosslink between residues
  MOD_RES (11)..(11): Alpha-Me S5-pentenyl-alanine olefin amino acid connected by an all-carbon crosslinker comprising one double bond
  C-term Tag5-FAM
IAQALRAIGDAFNAYYARR

SEQ ID NO: 566 - protein, 22 aa, Artificial Sequence
  Description of Artificial Sequence: Synthetic peptide
  N-term 5-FAM
  MOD_RES (1)..(1): 6-aminohexanoic acid
  MOD_RES (6)..(6): Alpha-Me S5-pentenyl-alanine olefin amino acid not connected by any crosslinker
  MOD_RES (10)..(10): Amino acid comprising two pentenyl-alanine olefin side chains that are not crosslinked
  MOD_RES (17)..(17): Alpha-Me S8-octenyl-alanine olefin amino acid not connected by any crosslinker
  C-term NH2
XIWIAAALRAIGDEFNAYYARR

SEQ ID NO: 567 - protein, 22 aa, Artificial Sequence
  Description of Artificial Sequence: Synthetic peptide
  N-term 5-FAM
  MOD_RES (1)..(1): 6-aminohexanoic acid
  MOD_RES (6)..(6): Alpha-Me R5-pentenyl-alanine olefin amino acid connected by an all-carbon crosslinker comprising one double bond
  MISC_FEATURE (6)..(10): Crosslink between residues
  MOD_RES (10)..(10): Two pentenyl-alanine olefin side chains, each of which is crosslinked to another amino acid as indicated
  MISC_FEATURE (10)..(14): Crosslink between residues
  MOD_RES (14)..(14): Alpha-Me S5-pentenyl-alanine olefin amino acid connected by an all-carbon crosslinker comprising one double bond
  C-term NH2
XIWIAAALRAIGDAFNAYYARR

SEQ ID NO: 568 - protein, 21 aa, Artificial Sequence
  Description of Artificial Sequence: Synthetic peptide
  N-term Ac
  MOD_RES (12)..(12): Alpha-Me S5-pentenyl-alanine olefin amino acid connected by an all-carbon crosslinker comprising one double bond
  MISC_FEATURE (12)..(16): Crosslink between residues
  MOD_RES (16)..(16): Alpha-Me S5-pentenyl-alanine olefin amino acid connected by an all-carbon crosslinker comprising one double bond
  C-term NH2
AAARAAARAAAAAAAAAAAAA

SEQ ID NO: 569 - protein, 21 aa, Artificial Sequence
  Description of Artificial Sequence: Synthetic peptide
  N-term Ac
  MOD_RES (9)..(9): Alpha-Me S5-pentenyl-alanine olefin amino acid connected by an all-carbon crosslinker comprising one double bond
  MISC_FEATURE (9)..(13): Crosslink between residues
  MOD_RES (13)..(13): Alpha-Me S5-pentenyl-alanine olefin amino acid connected by an all-carbon crosslinker comprising one double bond
  C-term NH2
AAAAAAARAAAAAAAAAAARA

SEQ ID NO: 570 - protein, 21 aa, Artificial Sequence
  Description of Artificial Sequence: Synthetic peptide
  N-term Ac
  C-term NH2
AAARAAARAAAKAAAEAAAAA

SEQ ID NO: 571 - protein, 21 aa, Artificial Sequence
  Description of Artificial Sequence: Synthetic peptide
  N-term Ac
  C-term NH2
AAAAAAARKAAAEAAAAAARA

SEQ ID NO: 572 - protein, 16 aa, Artificial Sequence
  Description of Artificial Sequence: Synthetic peptide
  N-term Ac
  C-term NH2
AAARAAAAAARAAAAA

SEQ ID NO: 573 - protein, 21 aa, Artificial Sequence
  Description of Artificial Sequence: Synthetic peptide
  N-term Ac
  MOD_RES (9)..(9): Alpha-Me S5-pentenyl-alanine olefin amino acid cyclized and then olefin hydroxylated
  MISC_FEATURE (9)..(13): Crosslink between residues
  MOD_RES (13)..(13): Alpha-Me S5-pentenyl-alanine olefin amino acid cyclized and then olefin hydroxylated
  C-term NH2
IWIAQELRAIGDAFNAYYARR

SEQ ID NO: 574 - protein, 21 aa, Artificial Sequence
  Description of Artificial Sequence: Synthetic peptide
  N-term Ac
  MOD_RES (5)..(5): Alpha-Me R5-pentenyl-alanine olefin amino acid not connected by any crosslinker
  MOD_RES (9)..(9): Amino acid comprising two pentenyl-alanine olefin side chains that are not crosslinked
  MOD_RES (13)..(13): Alpha-Me S5-pentenyl-alanine olefin amino acid not connected by any crosslinker
  C-term NH2
IWIAAALRAIGDAFNAYYARR

SEQ ID NO: 575 - protein, 21 aa, Artificial Sequence
  Description of Artificial Sequence: Synthetic peptide
  N-term Ac
  MOD_RES (5)..(5): Alpha-Me S5-pentenyl-alanine olefin amino acid not connected by any crosslinker
  MOD_RES (9)..(9): Amino acid comprising two pentenyl-alanine olefin side chains that are not crosslinked
  MOD_RES (16)..(16): Alpha-Me S8-octenyl-alanine olefin amino acid not connected by any crosslinker
  C-term NH2
IWIAAALRAIGDEFNAYYARR

SEQ ID NO: 576 - protein, 21 aa, Artificial Sequence
  Description of Artificial Sequence: Synthetic peptide
  N-term Ac
  MOD_RES (2)..(2): Alpha-Me R8-octenyl-alanine olefin amino acid connected by an all-carbon crosslinker comprising one double bond
  MISC_FEATURE (2)..(9): Crosslink between residues
  MOD_RES (9)..(9): Alpha-Me S5-pentenyl-alanine olefin amino acid connected by an all-carbon crosslinker comprising one double bond
  C-term NH2
IAIAQALRAIGDEFNAYYARR

SEQ ID NO: 577 - protein, 21 aa, Artificial Sequence
  Description of Artificial Sequence: Synthetic peptide
  N-term Ac
  MOD_RES (12)..(12): Alpha-Me R8-octenyl-alanine olefin amino acid connected by an all-carbon crosslinker comprising one double bond
  MISC_FEATURE (12)..(19): Crosslink between residues
  MOD_RES (19)..(19): Alpha-Me S5-pentenyl-alanine olefin amino acid connected by an all-carbon crosslinker comprising one double bond
  C-term NH2
IWIAQALRRIGAEFNAYYARR

SEQ ID NO: 578 - protein, 21 aa, Artificial Sequence
  Description of Artificial Sequence: Synthetic peptide
  N-term Ac
  MOD_RES (2)..(2): Alpha-Me R8-octenyl-alanine olefin amino acid not connected by any crosslinker
  MOD_RES (9)..(9): Alpha-Me S5-pentenyl-alanine olefin amino acid not connected by any crosslinker
  C-term NH2
IAIAQALRAIGDEFNAYYARR

SEQ ID NO: 579 - protein, 21 aa, Artificial Sequence
  Description of Artificial Sequence: Synthetic peptide
  N-term Ac
  MOD_RES (12)..(12): Alpha-Me R8-octenyl-alanine olefin amino acid not connected by any crosslinker
  MOD_RES (19)..(19): Alpha-Me S5-pentenyl-alanine olefin amino acid not connected by any crosslinker
  C-term NH2
IWIAQALRRIGAEFNAYYARR

SEQ ID NO: 580 - protein, 21 aa, Artificial Sequence
  Description of Artificial Sequence: Synthetic peptide
  N-term Ac
  MOD_RES (9)..(9): Alpha-Me S5-pentenyl-alanine olefin amino acid connected by an all-carbon crosslinker comprising one double bond
  MISC_FEATURE (9)..(13): Crosslink between residues
  MOD_RES (13)..(13): Alpha-Me S5-pentenyl-alanine olefin amino acid connected by an all-carbon crosslinker comprising one double bond
  MOD_RES (19)..(19): 2-aminoisobutyric acid
  C-term NH2
RWIAQALRAIGDAFNAFYXRR

SEQ ID NO: 581 - protein, 21 aa, Artificial Sequence
  Description of Artificial Sequence: Synthetic peptide
  N-term Ac
  MOD_RES (9)..(9): Alpha-Me S5-pentenyl-alanine olefin amino acid connected by an all-carbon crosslinker comprising one double bond
  MISC_FEATURE (9)..(13): Crosslink between residues
  MOD_RES (13)..(13): Alpha-Me S5-pentenyl-alanine olefin amino acid connected by an all-carbon crosslinker comprising one double bond
  C-term NH2
RWIAQALRAIGDAFNASYARR

SEQ ID NO: 582 - protein, 21 aa, Artificial Sequence
  Description of Artificial Sequence: Synthetic peptide
  N-term Ac
  MOD_RES (9)..(9): Alpha-Me R5-pentenyl-alanine olefin amino acid connected by an all-carbon crosslinker comprising one double bond
  MISC_FEATURE (9)..(13): Crosslink between residues
  MOD_RES (13)..(13): Alpha-Me R5-pentenyl-alanine olefin amino acid connected by an all-carbon crosslinker comprising one double bond
  C-term NH2
RWIAQALRAIGDAFNAFYARR

SEQ ID NO: 583 - protein, 21 aa, Artificial Sequence
  Description of Artificial Sequence: Synthetic peptide
  N-term Ac
  MOD_RES (15)..(15): Alpha-Me S5-pentenyl-alanine olefin amino acid connected by an all-carbon crosslinker comprising one double bond
  MISC_FEATURE (15)..(19): Crosslink between residues
  MOD_RES (19)..(19): Alpha-Me S5-pentenyl-alanine olefin amino acid connected by an all-carbon crosslinker comprising one double bond
  C-term NH2
IWIAQALRRIGDEFAAYYARR

SEQ ID NO: 584 - protein, 21 aa, Artificial Sequence
  Description of Artificial Sequence: Synthetic peptide
  N-term Ac
  MOD_RES (9)..(9): Alpha-Me S5-pentenyl-alanine olefin amino acid connected by an all-carbon crosslinker comprising one double bond
  MISC_FEATURE (9)..(13): Crosslink between residues
  MOD_RES (13)..(13): Alpha-Me S5-pentenyl-alanine olefin amino acid connected by an all-carbon crosslinker comprising one double bond
  C-term NH2
RWIAEALRAIGDAFNAFYARR

SEQ ID NO: 585 - protein, 21 aa, Artificial Sequence
  Description of Artificial Sequence: Synthetic peptide
  N-term Ac
  MOD_RES (9)..(9): Alpha-Me S5-pentenyl-alanine olefin amino acid connected by an all-carbon crosslinker comprising one double bond
  MISC_FEATURE (9)..(13): Crosslink between residues
  MOD_RES (13)..(13): Alpha-Me S5-pentenyl-alanine olefin amino acid connected by an all-carbon crosslinker comprising one double bond
  C-term NH2
RWIAEALRAIGDAFDAFYARR

SEQ ID NO: 586 - protein, 21 aa, Artificial Sequence
  Description of Artificial Sequence: Synthetic peptide
  N-term Ac
  MOD_RES (9)..(9): Alpha-Me R5-pentenyl-alanine olefin amino acid not connected by any crosslinker
  MOD_RES (13)..(13): Alpha-Me S5-pentenyl-alanine olefin amino acid not connected by any crosslinker
  C-term NH2
RWIAQALRAIGDAFNAFYARR

SEQ ID NO: 587 - protein, 21 aa, Artificial Sequence
  Description of Artificial Sequence: Synthetic peptide
  N-term Ac
  MOD_RES (9)..(9): Alpha-Me S5-pentenyl-alanine olefin amino acid not connected by any crosslinker
  MOD_RES (13)..(13): Alpha-Me R5-pentenyl-alanine olefin amino acid not connected by any crosslinker
  C-term NH2
RWIAQALRAIGDAFNAFYARR

SEQ ID NO: 588 - protein, 21 aa, Artificial Sequence
  Description of Artificial Sequence: Synthetic peptide
  N-term Ac
  MOD_RES (12)..(12): Alpha-Me S5-pentenyl-alanine olefin amino acid connected by an all-carbon crosslinker comprising one double bond
  MISC_FEATURE (12)..(16): Crosslink between residues
  MOD_RES (16)..(16): Alpha-Me S5-pentenyl-alanine olefin amino acid connected by an all-carbon crosslinker comprising one double bond
  C-term NH2
IWIAQALRRIGAEFNAYYARR

SEQ ID NO: 589 - protein, 21 aa, Artificial Sequence
  Description of Artificial Sequence: Synthetic peptide
  N-term Ac
  MOD_RES (13)..(13): Alpha-Me S5-pentenyl-alanine olefin amino acid connected by an all-carbon crosslinker comprising one double bond
  MISC_FEATURE (13)..(17): Crosslink between residues
  MOD_RES (17)..(17): Alpha-Me S5-pentenyl-alanine olefin amino acid connected by an all-carbon crosslinker comprising one double bond
  C-term NH2
IWIAQALRRIGDAFNAAYARR

SEQ ID NO: 590 - protein, 21 aa, Artificial Sequence
  Description of Artificial Sequence: Synthetic peptide
  N-term Ac
  MOD_RES (14)..(14): Alpha-Me S5-pentenyl-alanine olefin amino acid connected by an all-carbon crosslinker comprising one double bond
  MISC_FEATURE (14)..(18): Crosslink between residues
  MOD_RES (18)..(18): Alpha-Me S5-pentenyl-alanine olefin amino acid connected by an all-carbon crosslinker comprising one double bond
  C-term NH2
IWIAQALRRIGDEANAYAARR

SEQ ID NO: 591 - protein, 21 aa, Artificial Sequence
  Description of Artificial Sequence: Synthetic peptide
  N-term Ac
  MOD_RES (13)..(13): Alpha-Me R8-octenyl-alanine olefin amino acid connected by an all-carbon crosslinker comprising one double bond
  MISC_FEATURE (13)..(20): Crosslink between residues
  MOD_RES (20)..(20): Alpha-Me S5-pentenyl-alanine olefin amino acid connected by an all-carbon crosslinker comprising one double bond
  C-term NH2
IWIAQALRRIGDAFNAYYAAR

SEQ ID NO: 592 - protein, 19 aa, Artificial Sequence
  Description of Artificial Sequence: Synthetic peptide
  N-term heptenoic acid crosslinked with position 4 via a reduced olefin crosslinker
  MOD_RES (4)..(4): Modified alanine amino acid connected by a reduced olefin crosslinker
  MOD_RES (7)..(7): Modified alanine amino acid connected by a reduced olefin crosslinker
  MISC_FEATURE (7)..(11): Crosslink between residues
  MOD_RES (11)..(11): Modified alanine amino acid connected by a reduced olefin crosslinker
  C-term NH2
IAQALRAIGDAFNAYYARR

SEQ ID NO: 593 - protein, 16 aa, Artificial Sequence
  Description of Artificial Sequence: Synthetic peptide
  N-term Ac
  C-term NH2
SYDDALLMLRSIGDSL

SEQ ID NO: 594 - protein, 16 aa, Artificial Sequence
  Description of Artificial Sequence: Synthetic peptide
  N-term Ac
  C-term NH2
TEMMLAIMLRGIGDSL

SEQ ID NO: 595 - protein, 16 aa, Artificial Sequence
  Description of Artificial Sequence: Synthetic peptide
  N-term Ac
  C-term NH2
WVSEFLAIGDYVDFHY

SEQ ID NO: 596 - protein, 16 aa, Artificial Sequence
  Description of Artificial Sequence: Synthetic peptide
  N-term Ac
  C-term NH2
DLPVFILRNIGDSLIG

SEQ ID NO: 597 - protein, 16 aa, Artificial Sequence
  Description of Artificial Sequence: Synthetic peptide
  N-term Ac
  C-term NH2
VSDFDDFLTSVLDIYL

SEQ ID NO: 598 - protein, 22 aa, Artificial Sequence
  Description of Artificial Sequence: Synthetic peptide
  N-term 5-FAM
  MOD_RES (1)..(1): 6-aminohexanoic acid
  MOD_RES (6)..(6): Alpha-Me S5-pentenyl-alanine olefin amino acid connected by an all-carbon crosslinker comprising one double bond
  MISC_FEATURE (6)..(10): Crosslink between residues
  MOD_RES (10)..(10): Alpha-Me S5-pentenyl-alanine olefin amino acid connected by an all-carbon crosslinker comprising one double bond
  C-term NH2
XIWIAAALRAIGDEFNAYYARR

SEQ ID NO: 599 - protein, 22 aa, Artificial Sequence
  Description of Artificial Sequence: Synthetic peptide
  N-term 5-FAM
  MOD_RES (1)..(1): 6-aminohexanoic acid
  MOD_RES (16)..(16): Alpha-Me S5-pentenyl-alanine olefin amino acid connected by an all-carbon crosslinker comprising one double bond
  MISC_FEATURE (16)..(20): Crosslink between residues
  MOD_RES (20)..(20): Alpha-Me S5-pentenyl-alanine olefin amino acid connected by an all-carbon crosslinker comprising one double bond
  C-term NH2
XIWIAQALRRIGDEFAAYYARR

SEQ ID NO: 600 - protein, 22 aa, Artificial Sequence
  Description of Artificial Sequence: Synthetic peptide
  N-term 5-FAM
  MOD_RES (1)..(1): 6-aminohexanoic acid
  MOD_RES (3)..(3): Alpha-Me S5-pentenyl-alanine olefin amino acid connected by an all-carbon crosslinker comprising one double bond
  MISC_FEATURE (3)..(7): Crosslink between residues
  MOD_RES (7)..(7): Alpha-Me S5-pentenyl-alanine olefin amino acid connected by an all-carbon crosslinker comprising one double bond
  C-term NH2
XIAIAQALRRIGDEFNAYYARR

SEQ ID NO: 601 - protein, 22 aa, Artificial Sequence
  Description of Artificial Sequence: Synthetic peptide
  N-term 5-FAM
  MOD_RES (1)..(1): 6-aminohexanoic acid
  MOD_RES (3)..(3): Alpha-Me S5-pentenyl-alanine olefin amino acid connected by an all-carbon crosslinker comprising one double bond
  MISC_FEATURE (3)..(7): Crosslink between residues
  MOD_RES (7)..(7): Alpha-Me S5-pentenyl-alanine olefin amino acid connected by an all-carbon crosslinker comprising one double bond
  MOD_RES (10)..(10): Alpha-Me S5-pentenyl-alanine olefin amino acid connected by an all-carbon crosslinker comprising one double bond
  MISC_FEATURE (10)..(14): Crosslink between residues
  MOD_RES (14)..(14): Alpha-Me S5-pentenyl-alanine olefin amino acid connected by an all-carbon crosslinker comprising one double bond
  C-term NH2
XIAIAQALRAIGDAFNAYYARR

SEQ ID NO: 602 - protein, 22 aa, Artificial Sequence
  Description of Artificial Sequence: Synthetic peptide
  N-term 5-FAM
  MOD_RES (1)..(1): 6-aminohexanoic acid
  MOD_RES (13)..(13): Alpha-Me S5-pentenyl-alanine olefin amino acid connected by an all-carbon crosslinker comprising one double bond
  MISC_FEATURE (13)..(17): Crosslink between residues
  MOD_RES (17)..(17): Alpha-Me S5-pentenyl-alanine olefin amino acid connected by an all-carbon crosslinker comprising one double bond
  C-term NH2
XIWIAQALRRIGAEFNAYYARR

SEQ ID NO: 603 - protein, 22 aa, Artificial Sequence
  Description of Artificial Sequence: Synthetic peptide
  N-term 5-FAM
  MOD_RES (1)..(1): 6-aminohexanoic acid
  MOD_RES (14)..(14): Alpha-Me S5-pentenyl-alanine olefin amino acid connected by an all-carbon crosslinker comprising one double bond
  MISC_FEATURE (14)..(18): Crosslink between residues
  MOD_RES (18)..(18): Alpha-Me S5-pentenyl-alanine olefin amino acid connected by an all-carbon crosslinker comprising one double bond
  C-term NH2
XIWIAQALRRIGDAFNAAYARR

SEQ ID NO: 604 - protein, 22 aa, Artificial Sequence
  Description of Artificial Sequence: Synthetic peptide
  N-term 5-FAM
  MOD_RES (1)..(1): 6-aminohexanoic acid
  MOD_RES (15)..(15): Alpha-Me S5-pentenyl-alanine olefin amino acid connected by an all-carbon crosslinker comprising one double bond
  MISC_FEATURE (15)..(19): Crosslink between residues
  MOD_RES (19)..(19): Alpha-Me S5-pentenyl-alanine olefin amino acid connected by an all-carbon crosslinker comprising one double bond
  C-term NH2
XIWIAQALRRIGDEANAYAARR

SEQ ID NO: 605 - protein, 22 aa, Artificial Sequence
  Description of Artificial Sequence: Synthetic peptide
  N-term 5-FAM
  MOD_RES (1)..(1): 6-aminohexanoic acid
  MOD_RES (3)..(3): Alpha-Me R8-octenyl-alanine olefin amino acid connected by an all-carbon crosslinker comprising one double bond
  MISC_FEATURE (3)..(10): Crosslink between residues
  MOD_RES (10)..(10): Alpha-Me S5-pentenyl-alanine olefin amino acid connected by an all-carbon crosslinker comprising one double bond
  C-term NH2
XIAIAQALRAIGDEFNAYYARR

SEQ ID NO: 606 - protein, 22 aa, Artificial Sequence
  Description of Artificial Sequence: Synthetic peptide
  N-term 5-FAM
  MOD_RES (1)..(1): 6-aminohexanoic acid
  MOD_RES (14)..(14): Alpha-Me R8-octenyl-alanine olefin amino acid connected by an all-carbon crosslinker comprising one double bond
  MISC_FEATURE (14)..(21): Crosslink between residues
  MOD_RES (21)..(21): Alpha-Me S5-pentenyl-alanine olefin amino acid connected by an all-carbon crosslinker comprising one double bond
  C-term NH2
XIWIAQALRRIGDAFNAYYAAR

SEQ ID NO: 607 - protein, 22 aa, Artificial Sequence
  Description of Artificial Sequence: Synthetic peptide
  N-term 5-FAM
  MOD_RES (1)..(1): 6-aminohexanoic acid
  MOD_RES (14)..(14): Alpha-Me R8-octenyl-alanine olefin amino acid connected by an all-carbon crosslinker comprising one double bond
  MISC_FEATURE (14)..(21): Crosslink between residues
  MOD_RES (21)..(21): Alpha-Me S5-pentenyl-alanine olefin amino acid connected by an all-carbon crosslinker comprising one double bond
  C-term NH2
XIWIAQALRRIGDAFNAYYAAR

SEQ ID NO: 608 - protein, 21 aa, Artificial Sequence
  Description of Artificial Sequence: Synthetic peptide
  N-term Ac
  MOD_RES (9)..(9): Alpha-Me S5-pentenyl-alanine olefin amino acid connected by an all-carbon crosslinker comprising one double bond
  MISC_FEATURE (9)..(13): Crosslink between residues
  MOD_RES (13)..(13): Alpha-Me S5-pentenyl-alanine olefin amino acid connected by an all-carbon crosslinker comprising one double bond
  C-term NH2
RWIAQALRAIGDAFDAFYARR

SEQ ID NO: 609 - protein, 21 aa, Artificial Sequence
  Description of Artificial Sequence: Synthetic peptide
  N-term Ac
  MOD_RES (5)..(5): Alpha-Me S5-pentenyl-alanine olefin amino acid connected by an all-carbon crosslinker comprising one double bond
  MISC_FEATURE (5)..(9): Crosslink between residues
  MOD_RES (9)..(9): Two pentenyl-alanine olefin side chains, each of which is crosslinked to another amino acid as indicated
  MISC_FEATURE (9)..(13): Crosslink between residues
  MOD_RES (13)..(13): Alpha-Me R5-pentenyl-alanine olefin amino acid connected by an all-carbon crosslinker comprising one double bond
  C-term NH2
IWIAAALRAIGDAFNAYYARR

SEQ ID NO: 610 - protein, 21 aa, Artificial Sequence
  Description of Artificial Sequence: Synthetic peptide
  N-term Ac
  MOD_RES (9)..(9): Alpha-Me S5-pentenyl-alanine olefin amino acid connected by an all-carbon crosslinker comprising one double bond
  MISC_FEATURE (9)..(13): Crosslink between residues
  MOD_RES (13)..(13): Two pentenyl-alanine olefin side chains, each of which is crosslinked to another amino acid as indicated
  MISC_FEATURE (13)..(17): Crosslink between residues
  MOD_RES (17)..(17): Alpha-Me R5-pentenyl-alanine olefin amino acid connected by an all-carbon crosslinker comprising one double bond
  C-term NH2
IWIAQALRAIGDAFNAAYARR

SEQ ID NO: 611 - protein, 21 aa, Artificial Sequence
  Description of Artificial Sequence: Synthetic peptide
  N-term Ac
  MOD_RES (5)..(5): Alpha-Me S5-pentenyl-alanine olefin amino acid connected by an all-carbon crosslinker comprising one double bond
  MISC_FEATURE (5)..(9): Crosslink between residues
  MOD_RES (9)..(9): Two pentenyl-alanine olefin side chains, each of which is crosslinked to another amino acid as indicated
  MISC_FEATURE (9)..(13): Crosslink between residues
  MOD_RES (13)..(13): Alpha-Me R5-pentenyl-alanine olefin amino acid connected by an all-carbon crosslinker comprising one double bond
  C-term NH2
RWIAAALRAIGDAFNAFYARR

SEQ ID NO: 612 - protein, 21 aa, Artificial Sequence
  Description of Artificial Sequence: Synthetic peptide
  N-term Ac
  MOD_RES (9)..(9): Alpha-Me S5-pentenyl-alanine olefin amino acid connected by an all-carbon crosslinker comprising one double bond
  MISC_FEATURE (9)..(13): Crosslink between residues
  MOD_RES (13)..(13): Two pentenyl-alanine olefin side chains, each of which is crosslinked to another amino acid as indicated
  MISC_FEATURE (13)..(17): Crosslink between residues
  MOD_RES (17)..(17): Alpha-Me R5-pentenyl-alanine olefin amino acid connected by an all-carbon crosslinker comprising one double bond
  C-term NH2
RWIAQALRAIGDAFNAAYARR

SEQ ID NO: 613 - protein, 16 aa, Artificial Sequence
  Description of Artificial Sequence: Synthetic peptide
  N-term Ac
  MOD_RES (3)..(3): Norleucine
  MOD_RES (4)..(4): Norleucine
  MOD_RES (8)..(8): Norleucine
  MOD_RES (11)..(11): Alpha-Me S5-pentenyl-alanine olefin amino acid connected by an all-carbon crosslinker comprising one double bond
  MISC_FEATURE (11)..(15): Crosslink between residues
  MOD_RES (15)..(15): Alpha-Me S5-pentenyl-alanine olefin amino acid connected by an all-carbon crosslinker comprising one double bond
  C-term NH2
TELLLAILLRAIGDAL

SEQ ID NO: 614 - protein, 16 aa, Artificial Sequence
  Description of Artificial Sequence: Synthetic peptide
  N-term Ac
  MOD_RES (7)..(7): Alpha-Me S5-pentenyl-alanine olefin amino acid connected by an all-carbon crosslinker comprising one double bond
  MISC_FEATURE (7)..(11): Crosslink between residues
  MOD_RES (11)..(11): Alpha-Me S5-pentenyl-alanine olefin amino acid connected by an all-carbon crosslinker comprising one double bond
  C-term NH2
WVSEFLAIGDAVDFHY

SEQ ID NO: 615 - protein, 16 aa, Artificial Sequence
  Description of Artificial Sequence: Synthetic peptide
  N-term Ac
  MOD_RES (9)..(9): Alpha-Me S5-pentenyl-alanine olefin amino acid connected by an all-carbon crosslinker comprising one double bond
  MISC_FEATURE (9)..(13): Crosslink between residues
  MOD_RES (13)..(13): Alpha-Me S5-pentenyl-alanine olefin amino acid connected by an all-carbon crosslinker comprising one double bond
  C-term NH2
DLPVFILRAIGDALIG

SEQ ID NO: 616 - protein, 16 aa, Artificial Sequence
  Description of Artificial Sequence: Synthetic peptide
  N-term Ac
  MOD_RES (10)..(10): Alpha-Me S5-pentenyl-alanine olefin amino acid connected by an all-carbon crosslinker comprising one double bond
  MISC_FEATURE (10)..(14): Crosslink between residues
  MOD_RES (14)..(14): Alpha-Me S5-pentenyl-alanine olefin amino acid connected by an all-carbon crosslinker comprising one double bond
  C-term NH2
VSDFDDFLTAVLDAYL

SEQ ID NO: 617 - protein, 21 aa, Artificial Sequence
  Description of Artificial Sequence: Synthetic peptide
  N-term Ac
  MOD_RES (9)..(9): Trans-olefin amino acid that is cyclized and then olefin hydroxylated
  MISC_FEATURE (9)..(13): Crosslink between residues
  MOD_RES (13)..(13): Trans-olefin amino acid that is cyclized and then olefin hydroxylated
  C-term NH2
RWIAQALRAIGDAFNAFYARR

SEQ ID NO: 618 - protein, 21 aa, Artificial Sequence
  Description of Artificial Sequence: Synthetic peptide
  N-term Ac
  MOD_RES (9)..(9): Alpha-Me R5-pentenyl-alanine olefin amino acid connected by an all-carbon crosslinker comprising one double bond
  MISC_FEATURE (9)..(13): Crosslink between residues
  MOD_RES (13)..(13): Two pentenyl-alanine olefin side chains, each of which is crosslinked to another amino acid as indicated
  MISC_FEATURE (13)..(17): Crosslink between residues
  MOD_RES (17)..(17): Alpha-Me S5-pentenyl-alanine olefin amino acid connected by an all-carbon crosslinker comprising one double bond
  C-term NH2
RWIAQALRAIGDAFNAAYARR

SEQ ID NO: 619 - protein, 21 aa, Artificial Sequence
  Description of Artificial Sequence: Synthetic peptide
  N-term Ac
  MOD_RES (9)..(9): Alpha-Me S5-pentenyl-alanine olefin amino acid connected by an all-carbon crosslinker comprising one double bond
  MISC_FEATURE (9)..(13): Crosslink between residues
  MOD_RES (13)..(13): Alpha-Me S5-pentenyl-alanine olefin amino acid connected by an all-carbon crosslinker comprising one double bond
  MOD_RES (16)..(16): 2-aminoisobutyric acid
  C-term NH2
RWIAQALRAIGDAFNXFYARR

SEQ ID NO: 620 - protein, 21 aa, Artificial Sequence
  Description of Artificial Sequence: Synthetic peptide
  N-term Ac
  MOD_RES (9)..(9): Alpha-Me S5-pentenyl-alanine olefin amino acid connected by an all-carbon crosslinker comprising one double bond
  MISC_FEATURE (9)..(13): Crosslink between residues
  MOD_RES (13)..(13): Alpha-Me S5-pentenyl-alanine olefin amino acid connected by an all-carbon crosslinker comprising one double bond
  MOD_RES (16)..(16): 2-aminoisobutyric acid
  MOD_RES (19)..(19): 2-aminoisobutyric acid
  C-term NH2
RWIAQALRAIGDAFNXFYXRR

SEQ ID NO: 621 - protein, 21 aa, Artificial Sequence
  Description of Artificial Sequence: Synthetic peptide
  N-term Ac-PEG3
  MOD_RES (9)..(9): Alpha-Me S5-pentenyl-alanine olefin amino acid connected by an all-carbon crosslinker comprising one double bond
  MISC_FEATURE (9)..(13): Crosslink between residues
  MOD_RES (13)..(13): Alpha-Me S5-pentenyl-alanine olefin amino acid connected by an all-carbon crosslinker comprising one double bond
  C-term NH2
RWIAQALRAIGDAFNAFYARR

SEQ ID NO: 622 - protein, 21 aa, Artificial Sequence
  Description of Artificial Sequence: Synthetic peptide
  N-term Ac
  MOD_RES (9)..(9): Alpha-Me S5-pentenyl-alanine olefin amino acid connected by an all-carbon crosslinker comprising one double bond
  MISC_FEATURE (9)..(13): Crosslink between residues
  MOD_RES (13)..(13): Alpha-Me S5-pentenyl-alanine olefin amino acid connected by an all-carbon crosslinker comprising one double bond
  MOD_RES (19)..(19): 2-aminoisobutyric acid
  C-term NH2
RWIAQALRAIGDAFNAFYXHH

SEQ ID NO: 623 - protein, 21 aa, Artificial Sequence
  Description of Artificial Sequence: Synthetic peptide
  N-term Ac
  MOD_RES (9)..(9): Alpha-Me S5-pentenyl-alanine olefin amino acid connected by an all-carbon crosslinker comprising one double bond
  MISC_FEATURE (9)..(13): Crosslink between residues
  MOD_RES (13)..(13): Alpha-Me S5-pentenyl-alanine olefin amino acid connected by an all-carbon crosslinker comprising one double bond
  MOD_RES (16)..(16): 2-aminoisobutyric acid
  C-term NH2
RWIAQALRAIGDAFNXFYAHH

SEQ ID NO: 624 - protein, 21 aa, Artificial Sequence
  Description of Artificial Sequence: Synthetic peptide
  N-term Ac
  MOD_RES (9)..(9): Alpha-Me S5-pentenyl-alanine olefin amino acid connected by an all-carbon crosslinker comprising one double bond
  MISC_FEATURE (9)..(13): Crosslink between residues
  MOD_RES (13)..(13): Alpha-Me S5-pentenyl-alanine olefin amino acid connected by an all-carbon crosslinker comprising one double bond
  MOD_RES (16)..(16): 2-aminoisobutyric acid
  MOD_RES (19)..(19): 2-aminoisobutyric acid
  C-term NH2
RWIAQALRAIGDAFNXFYXHH

SEQ ID NO: 625 - protein, 21 aa, Artificial Sequence
  Description of Artificial Sequence: Synthetic peptide
  N-term Ac
  MOD_RES (9)..(9): Alpha-Me S5-pentenyl-alanine olefin amino acid connected by an all-carbon crosslinker comprising one double bond
  MISC_FEATURE (9)..(13): Crosslink between residues
  MOD_RES (13)..(13): Alpha-Me S5-pentenyl-alanine olefin amino acid connected by an all-carbon crosslinker comprising one double bond
  MOD_RES (17)..(17): Alpha-methyl-L-Phe
  C-term NH2
RWIAQALRAIGDAFNAFYAHH

SEQ ID NO: 626 - protein, 21 aa, Artificial Sequence
  Description of Artificial Sequence: Synthetic peptide
  N-term Ac
  MOD_RES (9)..(9): Alpha-Me R5-pentenyl-alanine olefin amino acid connected by an all-carbon crosslinker comprising one double bond
  MISC_FEATURE (9)..(13): Crosslink between residues
  MOD_RES (13)..(13): Alpha-Me S5-pentenyl-alanine olefin amino acid connected by an all-carbon crosslinker comprising one double bond
  C-term NH2
RWIAQALRAIGDAFNAFYARR

SEQ ID NO: 627 - protein, 21 aa, Artificial Sequence
  Description of Artificial Sequence: Synthetic peptide
  N-term Ac
  MOD_RES (9)..(9): Alpha-Me S5-pentenyl-alanine olefin amino acid connected by an all-carbon crosslinker comprising one double bond
  MISC_FEATURE (9)..(13): Crosslink between residues
  MOD_RES (13)..(13): Alpha-Me R5-pentenyl-alanine olefin amino acid connected by an all-carbon crosslinker comprising one double bond
  C-term NH2
RWIAQALRAIGDAFNAFYARR

SEQ ID NO: 628 - protein, 21 aa, Artificial Sequence
  Description of Artificial Sequence: Synthetic peptide
  N-term Ac
  MOD_RES (9)..(9): Alpha-Me S5-pentenyl-alanine olefin amino acid connected by an all-carbon crosslinker comprising one double bond
  MISC_FEATURE (9)..(13): Crosslink between residues
  MOD_RES (13)..(13): Alpha-Me S5-pentenyl-alanine olefin amino acid connected by an all-carbon crosslinker comprising one double bond
  C-term PEG3-NH2
RWIAQALRAIGDAFNAFYARR

SEQ ID NO: 629 - protein, 21 aa, Artificial Sequence
  Description of Artificial Sequence: Synthetic peptide
  N-term Ac
  MOD_RES (6)..(6): Alpha-Me R8-octenyl-alanine olefin amino acid connected by an all-carbon crosslinker comprising one double bond
  MISC_FEATURE (6)..(13): Crosslink between residues
  MOD_RES (13)..(13): Two pentenyl-alanine olefin side chains, each of which is crosslinked to another amino acid as indicated
  MISC_FEATURE (13)..(20): Crosslink between residues
  MOD_RES (20)..(20): Alpha-Me S8-octenyl-alanine olefin amino acid connected by an all-carbon crosslinker comprising one double bond
  C-term NH2
RWIAQALRRIGDAFNAFYAAR

SEQ ID NO: 630 - protein, 21 aa, Artificial Sequence
  Description of Artificial Sequence: Synthetic peptide
  N-term Ac
  MOD_RES (2)..(2): Alpha-Me R8-octenyl-alanine olefin amino acid connected by an all-carbon crosslinker comprising one double bond
  MISC_FEATURE (2)..(9): Crosslink between residues
  MOD_RES (9)..(9): Two pentenyl-alanine olefin side chains, each of which is crosslinked to another amino acid as indicated
  MISC_FEATURE (9)..(16): Crosslink between residues
  MOD_RES (16)..(16): Alpha-Me S8-octenyl-alanine olefin amino acid connected by an all-carbon crosslinker comprising one double bond
  C-term NH2
RAIAQALRAIGDEFNAFYARR

SEQ ID NO: 631 - protein, 22 aa, Artificial Sequence
  Description of Artificial Sequence: Synthetic peptide
  N-term Ac
  MOD_RES (9)..(9): Alpha-Me S5-pentenyl-alanine olefin amino acid connected by an all-carbon crosslinker comprising one double bond
  MISC_FEATURE (9)..(13): Crosslink between residues
  MOD_RES (13)..(13): Alpha-Me S5-pentenyl-alanine olefin amino acid connected by an all-carbon crosslinker comprising one double bond
  MOD_RES (18)..(18): Alpha-methyl-L-Phe
  C-term NH2
RWIAQALRAIGDAFNADFYARR

SEQ ID NO: 632 - protein, 21 aa, Artificial Sequence
  Description of Artificial Sequence: Synthetic peptide
  N-term Ac
  MOD_RES (9)..(9): Asp with side-chain is involved in lactam formation
  MOD_RES (13)..(13): Lys with side-chain is involved in lactam formation
  C-term NH2
RWIAQALRDIGDKFNAFYARR

SEQ ID NO: 633 - protein, 21 aa, Artificial Sequence
  Description of Artificial Sequence: Synthetic peptide
  N-term Ac
  MOD_RES (9)..(9): Lys with side-chain is involved in lactam formation
  MOD_RES (13)..(13): Asp with side-chain is involved in lactam formation
  C-term NH2
RWIAQALRKIGDDFNAFYARR

SEQ ID NO: 634 - protein, 21 aa, Artificial Sequence
  Description of Artificial Sequence: Synthetic peptide
  N-term Ac
  MOD_RES (9)..(9): Alpha-Me S5-pentenyl-alanine olefin amino acid connected by an all-carbon crosslinker comprising one double bond
  MISC_FEATURE (9)..(13): Crosslink between residues
  MOD_RES (11)..(11): 2-aminoisobutyric acid
  MOD_RES (13)..(13): Alpha-Me S5-pentenyl-alanine olefin amino acid connected by an all-carbon crosslinker comprising one double bond
  C-term NH2
RWIAQALRAIXDAFNAFYARR

SEQ ID NO: 635 - protein, 14 aa, Artificial Sequence
  Description of Artificial Sequence: Synthetic peptide
  N-term Ac
  MOD_RES (2)..(2): Alpha-Me R5-pentenyl-alanine olefin amino acid connected by an all-carbon crosslinker comprising one double bond
  MISC_FEATURE (2)..(6): Crosslink between residues
  MOD_RES (6)..(6): Two pentenyl-alanine olefin side chains, each of which is crosslinked to another amino acid as indicated
  MISC_FEATURE (6)..(10): Crosslink between residues
  MOD_RES (10)..(10): Alpha-Me S5-pentenyl-alanine olefin amino acid connected by an all-carbon crosslinker comprising one double bond
  C-term NH2
RAIGDAFNAAYARR

SEQ ID NO: 636 - protein, 21 aa, Artificial Sequence
  Description of Artificial Sequence: Synthetic peptide
  N-term Ac
  MOD_RES (5)..(5): Alpha-Me S5-pentenyl-alanine olefin amino acid connected by an all-carbon crosslinker comprising one double bond
  MISC_FEATURE (5)..(9): Crosslink between residues
  MOD_RES (9)..(9): Two pentenyl-alanine olefin side chains, each of which is crosslinked to another amino acid as indicated
  MISC_FEATURE (9)..(13): Crosslink between residues
  MOD_RES (13)..(13): Alpha-Me R5-pentenyl-alanine olefin amino acid connected by an all-carbon crosslinker comprising one double bond
  MOD_RES (17)..(17): Alpha-methyl-L-Phe
  C-term NH2
RWIAAALRAIGDAFNAFYARR

SEQ ID NO: 637 - protein, 21 aa, Artificial Sequence
  Description of Artificial Sequence: Synthetic peptide
  N-term Ac
  MOD_RES (5)..(5): Alpha-Me R5-pentenyl-alanine olefin amino acid connected by an all-carbon crosslinker comprising one double bond
  MISC_FEATURE (5)..(9): Crosslink between residues
  MOD_RES (9)..(9): Two pentenyl-alanine olefin side chains, each of which is crosslinked to another amino acid as indicated
  MISC_FEATURE (9)..(13): Crosslink between residues
  MOD_RES (13)..(13): Alpha-Me S5-pentenyl-alanine olefin amino acid connected by an all-carbon crosslinker comprising one double bond
  MOD_RES (17)..(17): Alpha-methyl-L-Phe
  C-term NH2
RWIAAALRAIGDAFNAFYARR

SEQ ID NO: 638 - protein, 21 aa, Artificial Sequence
  Description of Artificial Sequence: Synthetic peptide
  N-term Ac
  MOD_RES (5)..(5): Alpha-Me S5-pentenyl-alanine olefin amino acid connected by an all-carbon crosslinker comprising one double bond
  MISC_FEATURE (5)..(9): Crosslink between residues
  MOD_RES (9)..(9): Two pentenyl-alanine olefin side chains, each of which is crosslinked to another amino acid as indicated
  MISC_FEATURE (9)..(13): Crosslink between residues
  MOD_RES (13)..(13): Alpha-Me R5-pentenyl-alanine olefin amino acid connected by an all-carbon crosslinker comprising one double bond
  MOD_RES (17)..(17): Alpha-methyl-L-Phe
  C-term NH2
IWIAAALRAIGDAFNAFYARR

SEQ ID NO: 639 - protein, 21 aa, Artificial Sequence
  Description of Artificial Sequence: Synthetic peptide
  N-term Ac
  MOD_RES (5)..(5): Alpha-Me R5-pentenyl-alanine olefin amino acid connected by an all-carbon crosslinker comprising one double bond
  MISC_FEATURE (5)..(9): Crosslink between residues
  MOD_RES (9)..(9): Two pentenyl-alanine olefin side chains, each of which is crosslinked to another amino acid as indicated
  MISC_FEATURE (9)..(13): Crosslink between residues
  MOD_RES (13)..(13): Alpha-Me S5-pentenyl-alanine olefin amino acid connected by an all-carbon crosslinker comprising one double bond
  MOD_RES (17)..(17): Alpha-methyl-L-Phe
  C-term NH2
IWIAAALRAIGDAFNAFYARR

SEQ ID NO: 640 - protein, 21 aa, Artificial Sequence
  Description of Artificial Sequence: Synthetic peptide
  N-term Ac
  MOD_RES (9)..(9): Alpha-Me S5-pentenyl-alanine olefin amino acid connected by an all-carbon crosslinker comprising one double bond
  MISC_FEATURE (9)..(13): Crosslink between residues
  MOD_RES (13)..(13): Alpha-Me S5-pentenyl-alanine olefin amino acid connected by an all-carbon crosslinker comprising one double bond
  C-term NH2
RWIAQQLRAIGDAFNAFYAHH

SEQ ID NO: 641 - protein, 21 aa, Artificial Sequence
  Description of Artificial Sequence: Synthetic peptide
  N-term Ac
  MOD_RES (9)..(9): Cysteine crosslinked with butyl linkage
  MISC_FEATURE (9)..(13): Crosslink between residues
  MOD_RES (13)..(13): Cysteine crosslinked with butyl linkage
  C-term NH2
RWIAQALRCIGDCFNAFYARR

SEQ ID NO: 642 - protein, 21 aa, Artificial Sequence
  Description of Artificial Sequence: Synthetic peptide
  N-term Ac
  MOD_RES (9)..(9): Cysteine crosslinked with transbutenyl linkage
  MOD_RES (13)..(13): Cysteine crosslinked with transbutenyl linkage
  C-term NH2
RWIAQALRCIGDCFNAFYARR

SEQ ID NO: 643 - protein, 21 aa, Artificial Sequence
  Description of Artificial Sequence: Synthetic peptide
  N-term Ac
  MOD_RES (9)..(9): Alpha-Me S5-pentenyl-alanine olefin amino acid connected by an all-carbon crosslinker comprising one double bond
  MISC_FEATURE (9)..(13): Crosslink between residues
  MOD_RES (13)..(13): Alpha-Me S5-pentenyl-alanine olefin amino acid connected by an all-carbon crosslinker comprising one double bond
  C-term NH2
RWIAQLLRAIGDAFNAFYARR

SEQ ID NO: 644 - protein, 21 aa, Artificial Sequence
  Description of Artificial Sequence: Synthetic peptide
  N-term Ac
  MOD_RES (9)..(9): Alpha-Me S5-pentenyl-alanine olefin amino acid connected by an all-carbon crosslinker comprising one double bond
  MISC_FEATURE (9)..(13): Crosslink between residues
  MOD_RES (13)..(13): Alpha-Me S5-pentenyl-alanine olefin amino acid connected by an all-carbon crosslinker comprising one double bond
  MOD_RES (17)..(17): homo-Phe
  C-term NH2
RWIAQALRAIGDAFNAFYARR

SEQ ID NO: 645 - protein, 21 aa, Artificial Sequence
  Description of Artificial Sequence: Synthetic peptide
  N-term Ac
  MOD_RES (9)..(9): Alpha-Me S5-pentenyl-alanine olefin amino acid connected by an all-carbon crosslinker comprising one double bond
  MISC_FEATURE (9)..(13): Crosslink between residues
  MOD_RES (13)..(13): Alpha-Me S5-pentenyl-alanine olefin amino acid connected by an all-carbon crosslinker comprising one double bond
  MOD_RES (17)..(17): Alpha-methyl-L-Phe
  MOD_RES (20)..(20): Alpha-methyl-L-Arg
  C-term NH2
RWIAQALRAIGDAFNAFYARR

SEQ ID NO: 646 - protein, 21 aa, Artificial Sequence
  Description of Artificial Sequence: Synthetic peptide
  N-term Biotin
  MOD_RES (9)..(9): Alpha-Me S5-pentenyl-alanine olefin amino acid connected by an all-carbon crosslinker comprising one double bond
  MISC_FEATURE (9)..(13): Crosslink between residues
  MOD_RES (13)..(13): Alpha-Me S5-pentenyl-alanine olefin amino acid connected by an all-carbon crosslinker comprising one double bond
  C-term NH2
IWIAQELRAIGDAFNAYYARR

SEQ ID NO: 647 - protein, 22 aa, Artificial Sequence
  Description of Artificial Sequence: Synthetic peptide
  N-term 5-FAM
  MOD_RES (1)..(1): 6-aminohexanoic acid
  MOD_RES (6)..(6): Alpha-Me S5-pentenyl-alanine olefin amino acid not connected by any crosslinker
  MOD_RES (10)..(10): Alpha-Me S5-pentenyl-alanine olefin amino acid not connected by any crosslinker
  C-term NH2
XIWIAAALRAIGDEFNAYYARR

SEQ ID NO: 648 - protein, 22 aa, Artificial Sequence
  Description of Artificial Sequence: Synthetic peptide
  N-term 5-FAM
  MOD_RES (1)..(1): 6-aminohexanoic acid
  MOD_RES (10)..(10): Alpha-Me S5-pentenyl-alanine olefin amino acid connected by an all-carbon crosslinker comprising one double bond
  MISC_FEATURE (10)..(14): Crosslink between residues
  MOD_RES (14)..(14): Alpha-Me S5-pentenyl-alanine olefin amino acid connected by an all-carbon crosslinker comprising one double bond
  C-term NH2
XRWIAQALRADIGAFNAFYARR

SEQ ID NO: 649 - protein, 21 aa, Artificial Sequence
  Description of Artificial Sequence: Synthetic peptide
  N-term Ac
  MOD_RES (9)..(9): Alpha-Me S5-pentenyl-alanine olefin amino acid connected by an all-carbon crosslinker comprising one double bond
  MISC_FEATURE (9)..(13): Crosslink between residues
  MOD_RES (13)..(13): Alpha-Me S5-pentenyl-alanine olefin amino acid connected by an all-carbon crosslinker comprising one double bond
  C-term OH
RWIAQALRAIGDAFNAFYARR

SEQ ID NO: 650 - protein, 21 aa, Artificial Sequence
  Description of Artificial Sequence: Synthetic peptide
  N-term Ac
  MOD_RES (9)..(9): Alpha-Me alkyne 1,5 triazole (5 carbon) amino acid
  MISC_FEATURE (9)..(13): Crosslink between residues
  MOD_RES (13)..(13): Alpha-Me azide 1,5 triazole (3 carbon) amino acid
  C-term NH2
IWIAQALRXIGDXFNAYYARR

SEQ ID NO: 651 - protein, 21 aa, Artificial Sequence
  Description of Artificial Sequence: Synthetic peptide
  N-term Ac
  MOD_RES (9)..(9): Alpha-Me S5-pentenyl-alanine olefin amino acid connected by an all-carbon crosslinker comprising one double bond
  MISC_FEATURE (9)..(13): Crosslink between residues
  MOD_RES (13)..(13): Alpha-Me S5-pentenyl-alanine olefin amino acid connected by an all-carbon crosslinker comprising one double bond
  C-term NH2
RWIAQQFRAIGDAFNAYYARR

SEQ ID NO: 652 - protein, 21 aa, Artificial Sequence
  Description of Artificial Sequence: Synthetic peptide
  N-term Ac
  MOD_RES (9)..(9): Alpha-Me S5-pentenyl-alanine olefin amino acid connected by an all-carbon crosslinker comprising one double bond
  MISC_FEATURE (9)..(13): Crosslink between residues
  MOD_RES (13)..(13): Alpha-Me S5-pentenyl-alanine olefin amino acid connected by an all-carbon crosslinker comprising one double bond
  C-term NH2
RWIAQQLRAIGDAFNAFYAHR

SEQ ID NO: 653 - protein, 21 aa, Artificial Sequence
  Description of Artificial Sequence: Synthetic peptide
  N-term Ac
  MOD_RES (9)..(9): Alpha-Me S5-pentenyl-alanine olefin amino acid connected by an all-carbon crosslinker comprising one double bond
  MISC_FEATURE (9)..(13): Crosslink between residues
  MOD_RES (13)..(13): Alpha-Me S5-pentenyl-alanine olefin amino acid connected by an all-carbon crosslinker comprising one double bond
  C-term NH2
RWIAQQLRAIGDAFNAFYARH

SEQ ID NO: 654 - protein, 21 aa, Artificial Sequence
  Description of Artificial Sequence: Synthetic peptide
  N-term Ac
  C-term NH2
RWIAQQLRRIGDEFNAFYAHH

SEQ ID NO: 655 - protein, 20 aa, Artificial Sequence
  Description of Artificial Sequence: Synthetic peptide
  N-term Pr
  MOD_RES (8)..(8): Alpha-Me S5-pentenyl-alanine olefin amino acid connected by an all-carbon crosslinker comprising one double bond
  MISC_FEATURE (8)..(12): Crosslink between residues
  MOD_RES (12)..(12): Alpha-Me S5-pentenyl-alanine olefin amino acid connected by an all-carbon crosslinker comprising one double bond
  C-term NH2
WIAQQLRAIGDAFNAFYARR

SEQ ID NO: 656 - protein, 19 aa, Artificial Sequence
  Description of Artificial Sequence: Synthetic peptide
  N-term Ac
  MOD_RES (8)..(8): Alpha-Me S5-pentenyl-alanine olefin amino acid connected by an all-carbon crosslinker comprising one double bond
  MISC_FEATURE (8)..(12): Crosslink between residues
  MOD_RES (12)..(12): Alpha-Me S5-pentenyl-alanine olefin amino acid connected by an all-carbon crosslinker comprising one double bond
  C-term NH2
WIAQQLRAIGDAFNAYYAR

SEQ ID NO: 657 - protein, 19 aa, Artificial Sequence
  Description of Artificial Sequence: Synthetic peptide
  N-term Ac
  MOD_RES (8)..(8): Alpha-Me S5-pentenyl-alanine olefin amino acid connected by an all-carbon crosslinker comprising one double bond
  MISC_FEATURE (8)..(12): Crosslink between residues
  MOD_RES (12)..(12): Alpha-Me S5-pentenyl-alanine olefin amino acid connected by an all-carbon crosslinker comprising one double bond
  C-term NH2
WIAQQLRAIGDAFNAFYAR

SEQ ID NO: 658 - protein, 21 aa, Artificial Sequence
  Description of Artificial Sequence: Synthetic peptide
  N-term Ac
  MOD_RES (9)..(9): Alpha-Me S5-pentenyl-alanine olefin amino acid connected by an all-carbon crosslinker comprising one double bond
  MISC_FEATURE (9)..(13): Crosslink between residues
  MOD_RES (13)..(13): Alpha-Me S5-pentenyl-alanine olefin amino acid connected by an all-carbon crosslinker comprising one double bond
  C-term NH2
IWIAQELDAIGDAFNAYYARR

SEQ ID NO: 659 - protein, 21 aa, Artificial Sequence
  Description of Artificial Sequence: Synthetic peptide
  N-term Ac
  MOD_RES (9)..(9): Alpha-Me S5-pentenyl-alanine olefin amino acid connected by an all-carbon crosslinker comprising one double bond
  MISC_FEATURE (9)..(13): Crosslink between residues
  MOD_RES (13)..(13): Alpha-Me S5-pentenyl-alanine olefin amino acid connected by an all-carbon crosslinker comprising one double bond
  C-term NH2
RWIAQALDAIGDAFNAFYARR

SEQ ID NO: 660 - protein, 21 aa, Artificial Sequence
  Description of Artificial Sequence: Synthetic peptide
  N-term Ac
  MOD_RES (9)..(9): Alpha-Me S5-pentenyl-alanine olefin amino acid connected by an all-carbon crosslinker comprising one double bond
  MISC_FEATURE (9)..(13): Crosslink between residues
  MOD_RES (13)..(13): Alpha-Me S5-pentenyl-alanine olefin amino acid connected by an all-carbon crosslinker comprising one double bond
  C-term NH2
IWIAQLLRAIGDAFNAFYARR

SEQ ID NO: 661 - protein, 21 aa, Artificial Sequence
  Description of Artificial Sequence: Synthetic peptide
  N-term Ac
  MOD_RES (9)..(9): Alpha-Me S5-pentenyl-alanine olefin amino acid connected by an all-carbon crosslinker comprising one double bond
  MISC_FEATURE (9)..(13): Crosslink between residues
  MOD_RES (13)..(13): Alpha-Me S5-pentenyl-alanine olefin amino acid connected by an all-carbon crosslinker comprising one double bond
  MOD_RES (14)..(14): 1-Naphthalanine
  C-term NH2
RWIAQQLRAIGDAANAYYARR

SEQ ID NO: 662 - protein, 21 aa, Artificial Sequence
  Description of Artificial Sequence: Synthetic peptide
  N-term Ac
  MOD_RES (9)..(9): Alpha-Me S5-pentenyl-alanine olefin amino acid connected by an all-carbon crosslinker comprising one double bond
  MISC_FEATURE (9)..(13): Crosslink between residues
  MOD_RES (13)..(13): Alpha-Me S5-pentenyl-alanine olefin amino acid connected by an all-carbon crosslinker comprising one double bond
  MOD_RES (14)..(14): 1-Naphthalanine
  C-term NH2
RWIAQLLRAIGDAANAYYARR

SEQ ID NO: 663 - protein, 21 aa, Artificial Sequence
  Description of Artificial Sequence: Synthetic peptide
  N-term Ac
  MOD_RES (9)..(9): Alpha-Me S5-pentenyl-alanine olefin amino acid connected by an all-carbon crosslinker comprising one double bond
  MISC_FEATURE (9)..(13): Crosslink between residues
  MOD_RES (13)..(13): Alpha-Me S5-pentenyl-alanine olefin amino acid connected by an all-carbon crosslinker comprising one double bond
  MOD_RES (14)..(14): 1-Naphthalanine
  C-term NH2
RWIAQALRAIGDAANAFYARR

SEQ ID NO: 664 - protein, 21 aa, Artificial Sequence
  Description of Artificial Sequence: Synthetic peptide
  N-term Ac
  MOD_RES (9)..(9): Alpha-Me azide 1,5 triazole (3 carbon) amino acid
  MISC_FEATURE (9)..(13): Crosslink between residues
  MOD_RES (13)..(13): Alpha-Me alkyne 1,5 triazole (5 carbon) amino acid
  C-term NH2
RWIAQALRXIGDXFNAFYARR

SEQ ID NO: 665 - protein, 21 aa, Artificial Sequence
  Description of Artificial Sequence: Synthetic peptide
  N-term Ac
  MOD_RES (9)..(9): Alpha-Me alkyne 1,5 triazole (5 carbon) amino acid
  MISC_FEATURE (9)..(13): Crosslink between residues
  MOD_RES (13)..(13): Alpha-Me azide 1,5 triazole (3 carbon) amino acid
  C-term NH2
RWIAQALRXIGDXFNAFYARR

SEQ ID NO: 666 - protein, 21 aa, Artificial Sequence
  Description of Artificial Sequence: Synthetic peptide
  N-term Ac
  MOD_RES (9)..(9): unbridged alpha-Me azide (3 carbon) amino acid
  MOD_RES (13)..(13): unbridged alpha-ME alkyne (5 carbon) amino acid
  C-term NH2
RWIAQALRAIGDAFNAFYARR

SEQ ID NO: 667 - protein, 21 aa, Artificial Sequence
  Description of Artificial Sequence: Synthetic peptide
  N-term Ac
  MOD_RES (9)..(9): unbridged alpha-ME alkyne (5 carbon) amino acid
  MOD_RES (13)..(13): unbridged alpha-Me azide (3 carbon) amino acid
  C-term NH2
RWIAQALRAIGDAFNAFYARR

SEQ ID NO: 668 - protein, 20 aa, Artificial Sequence
  Description of Artificial Sequence: Synthetic peptide
  N-term Pr
  MOD_RES (8)..(8): Alpha-Me S5-pentenyl-alanine olefin amino acid connected by an all-carbon crosslinker comprising one double bond
  MISC_FEATURE (8)..(12): Crosslink between residues
  MOD_RES (12)..(12): Alpha-Me S5-pentenyl-alanine olefin amino acid connected by an all-carbon crosslinker comprising one double bond
  C-term NH2
WIAQQLRAIGDAFNASYARR

SEQ ID NO: 669 - protein, 20 aa, Artificial Sequence
  Description of Artificial Sequence: Synthetic peptide
  N-term Pr
  MOD_RES (8)..(8): Alpha-Me S5-pentenyl-alanine olefin amino acid connected by an all-carbon crosslinker comprising one double bond
  MISC_FEATURE (8)..(12): Crosslink between residues
  MOD_RES (12)..(12): Alpha-Me S5-pentenyl-alanine olefin amino acid connected by an all-carbon crosslinker comprising one double bond
  C-term NH2
NIAQQLRAIGDAFNASYARR

SEQ ID NO: 670 - protein, 20 aa, Artificial Sequence
  Description of Artificial Sequence: Synthetic peptide
  N-term Pr
  MOD_RES (8)..(8): Alpha-Me S5-pentenyl-alanine olefin amino acid connected by an all-carbon crosslinker comprising one double bond
  MISC_FEATURE (8)..(12): Crosslink between residues
  MOD_RES (12)..(12): Alpha-Me S5-pentenyl-alanine olefin amino acid connected by an all-carbon crosslinker comprising one double bond
  C-term NH2
SIAQQLRAIGDAFNASYARR

SEQ ID NO: 671 - protein, 19 aa, Artificial Sequence
  Description of Artificial Sequence: Synthetic peptide
  N-term Pr
  MOD_RES (8)..(8): Alpha-Me S5-pentenyl-alanine olefin amino acid connected by an all-carbon crosslinker comprising one double bond
  MISC_FEATURE (8)..(12): Crosslink between residues
  MOD_RES (12)..(12): Alpha-Me S5-pentenyl-alanine olefin amino acid connected by an all-carbon crosslinker comprising one double bond
  C-term NH2
WIAQQLRAIGDAFNASYAR

SEQ ID NO: 672 - protein, 21 aa, Artificial Sequence
  Description of Artificial Sequence: Synthetic peptide
  N-term Ac
  MOD_RES (9)..(9): Alpha-Me S5-pentenyl-alanine olefin amino acid connected by an all-carbon crosslinker comprising one double bond
  MISC_FEATURE (9)..(13): Crosslink between residues
  MOD_RES (13)..(13): Alpha-Me S5-pentenyl-alanine olefin amino acid connected by an all-carbon crosslinker comprising one double bond
  C-term NH2
RWIAQNLRAIGDAFNAYYARR

SEQ ID NO: 673 - protein, 21 aa, Artificial Sequence
  Description of Artificial Sequence: Synthetic peptide
  N-term Ac
  MOD_RES (9)..(9): Alpha-Me S5-pentenyl-alanine olefin amino acid connected by an all-carbon crosslinker comprising one double bond
  MISC_FEATURE (9)..(13): Crosslink between residues
  MOD_RES (13)..(13): Alpha-Me S5-pentenyl-alanine olefin amino acid connected by an all-carbon crosslinker comprising one double bond
  C-term NH2
RWIAQRLRAIGDAFNAYYARR

SEQ ID NO: 674 - protein, 20 aa, Artificial Sequence
  Description of Artificial Sequence: Synthetic peptide
  N-term Pr
  MOD_RES (5)..(5): Alpha-Me S5-pentenyl-alanine olefin amino acid connected by an all-carbon crosslinker comprising one double bond
  MISC_FEATURE (5)..(9): Crosslink between residues
  MOD_RES (9)..(9): Alpha-Me S5-pentenyl-alanine olefin amino acid connected by an all-carbon crosslinker comprising one double bond
  C-term NH2
WIAQALRRAGDAFNASYARR

SEQ ID NO: 675 - protein, 21 aa, Artificial Sequence
  Description of Artificial Sequence: Synthetic peptide
  N-term Ac
  MOD_RES (9)..(9): Alpha-Me S5-pentenyl-alanine olefin amino acid connected by an all-carbon crosslinker comprising one double bond
  MISC_FEATURE (9)..(13): Crosslink between residues
  MOD_RES (13)..(13): Alpha-Me S5-pentenyl-alanine olefin amino acid connected by an all-carbon crosslinker comprising one double bond
  C-term NH2
RWIAQQLRAIGDAFNAYYAHR

SEQ ID NO: 676 - protein, 21 aa, Artificial Sequence
  Description of Artificial Sequence: Synthetic peptide
  N-term Ac
  MOD_RES (9)..(9): Alpha-Me S5-pentenyl-alanine olefin amino acid connected by an all-carbon crosslinker comprising one double bond
  MISC_FEATURE (9)..(13): Crosslink between residues
  MOD_RES (13)..(13): Alpha-Me S5-pentenyl-alanine olefin amino acid connected by an all-carbon crosslinker comprising one double bond
  C-term NH2
RWIAQQLRAIGDAFNAYYARH

SEQ ID NO: 677 - protein, 21 aa, Artificial Sequence
  Description of Artificial Sequence: Synthetic peptide
  N-term Ac
  MOD_RES (9)..(9): Alpha-Me S5-pentenyl-alanine olefin amino acid connected by an all-carbon crosslinker comprising one double bond
  MISC_FEATURE (9)..(13): Crosslink between residues
  MOD_RES (13)..(13): Alpha-Me S5-pentenyl-alanine olefin amino acid connected by an all-carbon crosslinker comprising one double bond
  C-term NH2
RWIAQQLRAIGDAFNAYYAHH

SEQ ID NO: 678 - protein, 20 aa, Artificial Sequence
  Description of Artificial Sequence: Synthetic peptide
  N-term Pr
  MOD_RES (8)..(8): Alpha-Me S5-pentenyl-alanine olefin amino acid connected by an all-carbon crosslinker comprising one double bond
  MISC_FEATURE (8)..(12): Crosslink between residues
  MOD_RES (12)..(12): Alpha-Me S5-pentenyl-alanine olefin amino acid connected by an all-carbon crosslinker comprising one double bond
  C-term NH2
WIAQQLRAIGDAFNASIARR

SEQ ID NO: 679 - protein, 21 aa, Artificial Sequence
  Description of Artificial Sequence: Synthetic peptide
  N-term Ac
  MOD_RES (9)..(9): Alpha-Me S5-pentenyl-alanine olefin amino acid connected by an all-carbon crosslinker comprising one double bond
  MISC_FEATURE (9)..(13): Crosslink between residues
  MOD_RES (13)..(13): Alpha-Me S5-pentenyl-alanine olefin amino acid connected by an all-carbon crosslinker comprising one double bond
  C-term NH2
IWIAQQLRAIEDAFNAYYARR

SEQ ID NO: 680 - protein, 22 aa, Artificial Sequence
  Description of Artificial Sequence: Synthetic peptide
  N-term FITC
  MOD_RES (1)..(1): Beta-Ala
  MOD_RES (10)..(10): Alpha-Me S5-pentenyl-alanine olefin amino acid connected by an all-carbon crosslinker comprising one double bond
  MISC_FEATURE (10)..(14): Crosslink between residues
  MOD_RES (14)..(14): Alpha-Me S5-pentenyl-alanine olefin amino acid connected by an all-carbon crosslinker comprising one double bond
  C-term NH2
AIWIAQELRAIGDAFNAYYARR

SEQ ID NO: 681 - protein, 22 aa, Artificial Sequence
  Description of Artificial Sequence: Synthetic peptide
  N-term FITC
  MOD_RES (1)..(1): Beta-Ala
  MOD_RES (10)..(10): Alpha-Me S5-pentenyl-alanine olefin amino acid connected by an all-carbon crosslinker comprising one double bond
  MISC_FEATURE (10)..(14): Crosslink between residues
  MOD_RES (14)..(14): Alpha-Me S5-pentenyl-alanine olefin amino acid connected by an all-carbon crosslinker comprising one double bond
  C-term NH2
AIWIAQELDAIGDAFNAYYARR

SEQ ID NO: 682 - protein, 22 aa, Artificial Sequence
  Description of Artificial Sequence: Synthetic peptide
  N-term FITC
  MOD_RES (1)..(1): Beta-Ala
  MOD_RES (10)..(10): Alpha-Me S5-pentenyl-alanine olefin amino acid connected by an all-carbon crosslinker comprising one double bond
  MISC_FEATURE (10)..(14): Crosslink between residues
  MOD_RES (14)..(14): Alpha-Me S5-pentenyl-alanine olefin amino acid connected by an all-carbon crosslinker comprising one double bond
  C-term NH2
ARWIAQALRAIGDAFNAFYARR

SEQ ID NO: 683 - protein, 22 aa, Artificial Sequence
  Description of Artificial Sequence: Synthetic peptide
  N-term FITC
  MOD_RES (1)..(1): Beta-Ala
  MOD_RES (10)..(10): Alpha-Me S5-pentenyl-alanine olefin amino acid connected by an all-carbon crosslinker comprising one double bond
  MISC_FEATURE (10)..(14): Crosslink between residues
  MOD_RES (14)..(14): Alpha-Me S5-pentenyl-alanine olefin amino acid connected by an all-carbon crosslinker comprising one double bond
  C-term NH2
ARWIAQALDAIGDAFNAFYARR

SEQ ID NO: 684 - protein, 21 aa, Artificial Sequence
  Description of Artificial Sequence: Synthetic peptide
  N-term HBS
  MOD_RES (3)..(3): N-allyl alanine after metathesis cyclization
  C-term NH2
IWAAQELRRIGDEFNAYYARR

SEQ ID NO: 685 - protein, 23 aa, Artificial Sequence
  Description of Artificial Sequence: Synthetic peptide
  N-term FITC
  MOD_RES (1)..(1): Beta-Ala
  MOD_RES (2)..(2): Beta-Ala
  MOD_RES (11)..(11): Alpha-Me S5-pentenyl-alanine olefin amino acid connected by an all-carbon crosslinker comprising one double bond
  MISC_FEATURE (11)..(15): Crosslink between residues
  MOD_RES (15)..(15): Alpha-Me S5-pentenyl-alanine olefin amino acid connected by an all-carbon crosslinker comprising one double bond
  C-term NH2
AARWIAQALRAIGDAFNAFYARR

SEQ ID NO: 686 - protein, 22 aa, Artificial Sequence
  Description of Artificial Sequence: Synthetic peptide
  N-term 5-TAMRA
  MOD_RES (1)..(1): Beta-Ala
  MOD_RES (10)..(10): Alpha-Me S5-pentenyl-alanine olefin amino acid connected by an all-carbon crosslinker comprising one double bond
  MISC_FEATURE (10)..(14): Crosslink between residues
  MOD_RES (14)..(14): Alpha-Me S5-pentenyl-alanine olefin amino acid connected by an all-carbon crosslinker comprising one double bond
  C-term NH2
AIWIAQELRAIGDAFNAYYARR

SEQ ID NO: 687 - protein, 22 aa, Artificial Sequence
  Description of Artificial Sequence: Synthetic peptide
  N-term 5-TAMRA
  MOD_RES (1)..(1): Beta-Ala
  MOD_RES (10)..(10): Alpha-Me S5-pentenyl-alanine olefin amino acid connected by an all-carbon crosslinker comprising one double bond
  MISC_FEATURE (10)..(14): Crosslink between residues
  MOD_RES (14)..(14): Alpha-Me S5-pentenyl-alanine olefin amino acid connected by an all-carbon crosslinker comprising one double bond
  C-term NH2
ARWIAQALRAIGDAFNAFYARR

SEQ ID NO: 688 - protein, 22 aa, Artificial Sequence
  Description of Artificial Sequence: Synthetic peptide
  N-term 5-TAMRA
  MOD_RES (1)..(1): Beta-Ala
  MOD_RES (10)..(10): Alpha-Me S5-pentenyl-alanine olefin amino acid connected by an all-carbon crosslinker comprising one double bond
  MISC_FEATURE (10)..(14): Crosslink between residues
  MOD_RES (14)..(14): Alpha-Me S5-pentenyl-alanine olefin amino acid connected by an all-carbon crosslinker comprising one double bond
  C-term NH2
AIWIAQELRAIEDAFNAYYARR

SEQ ID NO: 689 - protein, 21 aa, Artificial Sequence
  Description of Artificial Sequence: Synthetic peptide
  N-term Ac
  MOD_RES (9)..(9): Alpha-Me S5-pentenyl-alanine olefin amino acid connected by an all-carbon crosslinker comprising one double bond
  MISC_FEATURE (9)..(13): Crosslink between residues
  MOD_RES (13)..(13): Alpha-Me S5-pentenyl-alanine olefin amino acid connected by an all-carbon crosslinker comprising one double bond
  C-term NH2
RWIAQQLRAIGDAFNASYARR

SEQ ID NO: 690 - protein, 21 aa, Artificial Sequence
  Description of Artificial Sequence: Synthetic peptide
  N-term Ac
  MOD_RES (9)..(9): Alpha-Me R5-pentenyl-alanine olefin amino acid connected by an all-carbon crosslinker comprising one double bond
  MISC_FEATURE (9)..(13): Crosslink between residues
  MOD_RES (13)..(13): Two pentenyl-alanine olefin side chains, each of which is crosslinked to another amino acid as indicated
  MISC_FEATURE (13)..(17): Crosslink between residues
  MOD_RES (17)..(17): Alpha-Me S5-pentenyl-alanine olefin amino acid connected by an all-carbon crosslinker comprising one double bond
  C-term NH2
RWIAQQLRAIGDAFNAAYARR

SEQ ID NO: 691 - protein, 21 aa, Artificial Sequence
  Description of Artificial Sequence: Synthetic peptide
  N-term Ac
  MOD_RES (9)..(9): Alpha-Me S5-pentenyl-alanine olefin amino acid connected by an all-carbon crosslinker comprising one double bond
  MISC_FEATURE (9)..(13): Crosslink between residues
  MOD_RES (13)..(13): Alpha-Me S5-pentenyl-alanine olefin amino acid connected by an all-carbon crosslinker comprising one double bond
  MOD_RES (17)..(17): 13C labeled phenyl group of phenylalanine
  C-term NH2
RWIAQALRAIGDAFNAFYARR

SEQ ID NO: 692 - protein, 20 aa, Artificial Sequence
  Description of Artificial Sequence: Synthetic peptide
  N-term Ac
  MOD_RES (8)..(8): Alpha-Me R5-pentenyl-alanine olefin amino acid connected by an all-carbon crosslinker comprising one double bond
  MISC_FEATURE (8)..(12): Crosslink between residues
  MOD_RES (12)..(12): Two pentenyl-alanine olefin side chains, each of which is crosslinked to another amino acid as indicated
  MISC_FEATURE (12)..(16): Crosslink between residues
  MOD_RES (16)..(16): Alpha-Me S5-pentenyl-alanine olefin amino acid connected by an all-carbon crosslinker comprising one double bond
  C-term NH2
WIAQQLRAIGDAFNAAYARR

SEQ ID NO: 693 - protein, 19 aa, Artificial Sequence
  Description of Artificial Sequence: Synthetic peptide
  N-term Ac
  MOD_RES (8)..(8): Alpha-Me S5-pentenyl-alanine olefin amino acid connected by an all-carbon crosslinker comprising one double bond
  MISC_FEATURE (8)..(12): Crosslink between residues
  MOD_RES (12)..(12): Alpha-Me S5-pentenyl-alanine olefin amino acid connected by an all-carbon crosslinker comprising one double bond
  C-term NH2
RIAQELRAIGDAFNAYYAR

SEQ ID NO: 694 - protein, 19 aa, Artificial Sequence
  Description of Artificial Sequence: Synthetic peptide
  N-term Ac
  MOD_RES (8)..(8): Alpha-Me S5-pentenyl-alanine olefin amino acid connected by an all-carbon crosslinker comprising one double bond
  MISC_FEATURE (8)..(12): Crosslink between residues
  MOD_RES (12)..(12): Alpha-Me S5-pentenyl-alanine olefin amino acid connected by an all-carbon crosslinker comprising one double bond
  C-term NH2
RIAQQLRAIGDAFNAYYAR

SEQ ID NO: 695 - protein, 21 aa, Artificial Sequence
  Description of Artificial Sequence: Synthetic peptide
  N-term Ac
  MOD_RES (4)..(4): Universal 13C, 15N labeled alanine
  MOD_RES (7)..(7): Universal 13C, 15N labeled leucine
  MOD_RES (9)..(9): Alpha-Me S5-pentenyl-alanine olefin amino acid connected by an all-carbon crosslinker comprising one double bond
  MISC_FEATURE (9)..(13): Crosslink between residues
  MOD_RES (13)..(13): Alpha-Me S5-pentenyl-alanine olefin amino acid connected by an all-carbon crosslinker comprising one double bond
  C-term NH2
RWIAQALRAIGDAFNAFYARR

SEQ ID NO: 696 - protein, 21 aa, Artificial Sequence
  Description of Artificial Sequence: Synthetic peptide
  N-term Ac
  MOD_RES (9)..(9): S-allyl cysteine
  MISC_FEATURE (9)..(13): Crosslink between residues
  MOD_RES (13)..(13): S-allyl cysteine
  C-term NH2
IWIAQELRCIGRCFNAYYARR

SEQ ID NO: 697 - protein, 21 aa, Artificial Sequence
  Description of Artificial Sequence: Synthetic peptide
  N-term Ac
  MOD_RES (9)..(9): S-allyl cysteine
  MISC_FEATURE (9)..(13): Crosslink between residues
  MOD_RES (13)..(13): S-allyl cysteine
  C-term NH2
IWIAQELRCIGDCFNAYYARR

SEQ ID NO: 698 - protein, 21 aa, Artificial Sequence
  Description of Artificial Sequence: Synthetic peptide
  N-term Ac
  MOD_RES (9)..(9): Alpha-H azide 1,5 triazole (3 carbon) amino acid
  MISC_FEATURE (9)..(13): Crosslink between residues
  MOD_RES (13)..(13): Alpha-H alkyne 1,5 triazole (5 carbon) amino acid
  C-term NH2
IWIAQELRXIGDXFNAYYARR

SEQ ID NO: 699 - protein, 22 aa, Artificial Sequence
  Description of Artificial Sequence: Synthetic peptide
  N-term FITC
  MOD_RES (1)..(1): 6-aminohexanoic acid
  MOD_RES (10)..(10): Alpha-H azide 1,5 triazole (3 carbon) amino acid
  MISC_FEATURE (10)..(14): Crosslink between residues
  MOD_RES (14)..(14): Alpha-H alkyne 1,5 triazole (5 carbon) amino acid
  C-term NH2
XIWIAQELRXIGDXFNAYYARR

SEQ ID NO: 700 - protein, 19 aa, Artificial Sequence
  Description of Artificial Sequence: Synthetic peptide
  N-term heptenoic acid crosslinked with position 4 via an all-carbon crosslinker comprising one double bond
  MOD_RES (4)..(4): Alpha-Me S5-pentenyl-alanine olefin amino acid connected by an all-carbon crosslinker comprising one double bond
  MOD_RES (7)..(7): Alpha-Me S5-pentenyl-alanine olefin amino acid connected by an all-carbon crosslinker comprising one double bond
  MISC_FEATURE (7)..(11): Crosslink between residues
  MOD_RES (11)..(11): Alpha-Me S5-pentenyl-alanine olefin amino acid connected by an all-carbon crosslinker comprising one double bond
  C-term NH2
IAQALRAIGDAFNAFYARR

SEQ ID NO: 701 - protein, 19 aa, Artificial Sequence
  Description of Artificial Sequence: Synthetic peptide
  MOD_RES (4)..(4): Diaminopropionic acid
  C-term NH2
IAQXLRRIGDEFNAYYARR

SEQ ID NO: 702 - protein, 19 aa, Artificial Sequence
  Description of Artificial Sequence: Synthetic peptide
  MOD_RES (4)..(4): Diaminopropionic acid
  C-term NH2
IAQXLRRIGDQFNAYYARR

SEQ ID NO: 703 - protein, 20 aa, Artificial Sequence
  Description of Artificial Sequence: Synthetic peptide
  MOD_RES (4)..(4): Diaminopropionic acid
  C-term NH2
WIAXALRRIGDEFNAYYARR

SEQ ID NO: 704 - protein, 20 aa, Artificial Sequence
  Description of Artificial Sequence: Synthetic peptide
  MOD_RES (4)..(4): Diaminopropionic acid
  C-term NH2
WIAXALRRIGDQFNAYYARR

SEQ ID NO: 705 - protein, 19 aa, Artificial Sequence
  Description of Artificial Sequence: Synthetic peptide
  N-term heptenoic acid crosslinked with position 4 via an all-carbon crosslinker comprising one double bond
  MOD_RES (4)..(4): Alpha-Me S5-pentenyl-alanine olefin amino acid connected by an all-carbon crosslinker comprising one double bond
  MOD_RES (7)..(7): Alpha-Me S5-pentenyl-alanine olefin amino acid connected by an all-carbon crosslinker comprising one double bond
  MISC_FEATURE (7)..(11): Crosslink between residues
  MOD_RES (11)..(11): Alpha-Me S5-pentenyl-alanine olefin amino acid connected by an all-carbon crosslinker comprising one double bond
  C-term Tag5-FAM
IAQALRAIGDAFNAYYARR

SEQ ID NO: 706 - protein, 16 aa, Artificial Sequence
  Description of Artificial Sequence: Synthetic peptide
  N-term Ac
  MOD_RES (3)..(3): Norleucine
  MOD_RES (4)..(4): Norleucine
  MOD_RES (8)..(8): Norleucine
  MOD_RES (11)..(11): Alpha-Me S5-pentenyl-alanine olefin amino acid connected by an all-carbon crosslinker comprising one double bond
  MISC_FEATURE (11)..(15): Crosslink between residues
  MOD_RES (15)..(15): Alpha-Me S5-pentenyl-alanine olefin amino acid connected by an all-carbon crosslinker comprising one double bond
  C-term NH2
TELLLAILLRAIGDAL

SEQ ID NO: 707 - protein, 22 aa, Artificial Sequence
  Description of Artificial Sequence: Synthetic peptide
  N-term 5-TAMRA
  MOD_RES (1)..(1): Beta-Ala
  MOD_RES (10)..(10): Alpha-Me S5-pentenyl-alanine olefin amino acid connected by an all-carbon crosslinker comprising one double bond
  MISC_FEATURE (10)..(14): Crosslink between residues
  MOD_RES (14)..(14): Alpha-Me S5-pentenyl-alanine olefin amino acid connected by an all-carbon crosslinker comprising one double bond
  C-term NH2
AIWIAQELRAIGDAFNAYYARR

SEQ ID NO: 708 - protein, 21 aa, Artificial Sequence
  Description of Artificial Sequence: Synthetic peptide
  N-term Ac
  MOD_RES (9)..(9): Alpha-Me S5-pentenyl-alanine olefin amino acid connected by an all-carbon crosslinker comprising one double bond
  MISC_FEATURE (9)..(13): Crosslink between residues
  MOD_RES (13)..(13): Alpha-Me S5-pentenyl-alanine olefin amino acid connected by an all-carbon crosslinker comprising one double bond
  C-term NH2
RWIAQALRAIGDAFNAFYARR

SEQ ID NO: 709 - protein, 21 aa, Artificial Sequence
  Description of Artificial Sequence: Synthetic peptide
  N-term Ac
  MOD_RES (9)..(9): O-allyl serine
  MISC_FEATURE (9)..(13): Crosslink between residues
  MOD_RES (13)..(13): O-allyl serine
  C-term NH2
IWIAQELRSIGDSFNAYYARR

SEQ ID NO: 710 - protein, 21 aa, Artificial Sequence
  Description of Artificial Sequence: Synthetic peptide
  N-term Ac
  MOD_RES (9)..(9): O-allyl serine
  MISC_FEATURE (9)..(13): Crosslink between residues
  MOD_RES (11)..(11): 2-aminoisobutyric acid
  MOD_RES (13)..(13): O-allyl serine
  C-term NH2
IWIAQELRSIXDSFNAYYARR

SEQ ID NO: 711 - protein, 21 aa, Artificial Sequence
  Description of Artificial Sequence: Synthetic peptide
  N-term Ac
  MOD_RES (9)..(9): Alpha-methylated O-allyl serine
  MISC_FEATURE (9)..(13): Crosslink between residues
  MOD_RES (13)..(13): Alpha-methylated O-allyl serine
  C-term NH2
IWIAQELRSIGDSFNAYYARR

SEQ ID NO: 712 - protein, 19 aa, Artificial Sequence
  Description of Artificial Sequence: Synthetic peptide
  N-term heptenoic acid crosslinked with position 4 via an all-carbon crosslinker comprising one double bond
  MOD_RES (4)..(4): Alpha-Me S5-pentenyl-alanine olefin amino acid connected by an all-carbon crosslinker comprising one double bond
  MOD_RES (7)..(7): Alpha-Me S5-pentenyl-alanine olefin amino acid connected by an all-carbon crosslinker comprising one double bond
  MISC_FEATURE (7)..(11): Crosslink between residues
  MOD_RES (11)..(11): Alpha-Me S5-pentenyl-alanine olefin amino acid connected by an all-carbon crosslinker comprising one double bond
  C-term NH2
IAQALRAIGDAFNAYYARR

SEQ ID NO: 713 - protein, 21 aa, Artificial Sequence
  Description of Artificial Sequence: Synthetic peptide
  N-term Ac
  MOD_RES (9)..(9): Alpha-Me S5-pentenyl-alanine olefin amino acid connected by an all-carbon crosslinker comprising one double bond
  MISC_FEATURE (9)..(13): Crosslink between residues
  MOD_RES (13)..(13): Alpha-Me S5-pentenyl-alanine olefin amino acid connected by an all-carbon crosslinker comprising one double bond
  C-term NH2
RWIAQALRAIGDAVNAFYARR

SEQ ID NO: 714 - protein, 20 aa, Artificial Sequence
  Description of Artificial Sequence: Synthetic peptide
  N-term Pr
  MOD_RES (8)..(8): Alpha-Me S5-pentenyl-alanine olefin amino acid connected by an all-carbon crosslinker comprising one double bond
  MISC_FEATURE (8)..(12): Crosslink between residues
  MOD_RES (12)..(12): Alpha-Me S5-pentenyl-alanine olefin amino acid connected by an all-carbon crosslinker comprising one double bond
  C-term NH2
WIAQQLRAIGDAVNAFYARR

SEQ ID NO: 715 - protein, 21 aa, Artificial Sequence
  Description of Artificial Sequence: Synthetic peptide
  N-term Ac
  MOD_RES (9)..(9): Alpha-Me S5-pentenyl-alanine olefin amino acid connected by an all-carbon crosslinker comprising one double bond
  MISC_FEATURE (9)..(13): Crosslink between residues
  MOD_RES (13)..(13): Alpha-Me S5-pentenyl-alanine olefin amino acid connected by an all-carbon crosslinker comprising one double bond
  C-term NH2
RWIAQALRAIGDAVNASYARR

SEQ ID NO: 716 - protein, 21 aa, Artificial Sequence
  Description of Artificial Sequence: Synthetic peptide
  N-term Ac
  MOD_RES (9)..(9): Alpha-Me S5-pentenyl-alanine olefin amino acid connected by an all-carbon crosslinker comprising one double bond
  MISC_FEATURE (9)..(13): Crosslink between residues
  MOD_RES (13)..(13): Alpha-Me S5-pentenyl-alanine olefin amino acid connected by an all-carbon crosslinker comprising one double bond
  C-term NH2
RWIAQQLRAIGDAVNAFYARR

SEQ ID NO: 717 - protein, 21 aa, Artificial Sequence
  Description of Artificial Sequence: Synthetic peptide
  N-term Ac
  MOD_RES (9)..(9): Alpha-Me S5-pentenyl-alanine olefin amino acid connected by an all-carbon crosslinker comprising one double bond
  MISC_FEATURE (9)..(13): Crosslink between residues
  MOD_RES (13)..(13): Alpha-Me S5-pentenyl-alanine olefin amino acid connected by an all-carbon crosslinker comprising one double bond
  C-term NH2
RWIAQQLRAIGDAVNASYARR

SEQ ID NO: 718 - protein, 21 aa, Artificial Sequence
  Description of Artificial Sequence: Synthetic peptide
  N-term Ac
  MOD_RES (9)..(9): Alpha-Me S5-pentenyl-alanine olefin amino acid connected by an all-carbon crosslinker comprising one double bond
  MISC_FEATURE (9)..(13): Crosslink between residues
  MOD_RES (13)..(13): Alpha-Me S5-pentenyl-alanine olefin amino acid connected by an all-carbon crosslinker comprising one double bond
  C-term NH2
RWIAQALRAIGDALNAFYARR

SEQ ID NO: 719 - protein, 21 aa, Artificial Sequence
  Description of Artificial Sequence: Synthetic peptide
  N-term Ac
  MOD_RES (9)..(9): Alpha-Me S5-pentenyl-alanine olefin amino acid connected by an all-carbon crosslinker comprising one double bond
  MISC_FEATURE (9)..(13): Crosslink between residues
  MOD_RES (13)..(13): Alpha-Me S5-pentenyl-alanine olefin amino acid connected by an all-carbon crosslinker comprising one double bond
  C-term NH2
RWIAQQLRAIGDALNAFYARR

SEQ ID NO: 720 - protein, 20 aa, Artificial Sequence
  Description of Artificial Sequence: Synthetic peptide
  N-term Ac
  MOD_RES (14)..(14): Alpha-Me S5-pentenyl-alanine olefin amino acid connected by an all-carbon crosslinker comprising one double bond
  MISC_FEATURE (14)..(18): Crosslink between residues
  MOD_RES (18)..(18): Alpha-Me S5-pentenyl-alanine olefin amino acid connected by an all-carbon crosslinker comprising one double bond
  C-term NH2
KALETLRRVGDGVARNHATA

SEQ ID NO: 721 - protein, 20 aa, Artificial Sequence
  Description of Artificial Sequence: Synthetic peptide
  N-term Pr
  MOD_RES (8)..(8): Alpha-Me S5-pentenyl-alanine olefin amino acid connected by an all-carbon crosslinker comprising one double bond
  MISC_FEATURE (8)..(12): Crosslink between residues
  MOD_RES (12)..(12): Alpha-Me S5-pentenyl-alanine olefin amino acid connected by an all-carbon crosslinker comprising one double bond
  C-term NH2
WIAQQLRAIGDAVNAFYARR

SEQ ID NO: 722 - protein, 20 aa, Artificial Sequence
  Description of Artificial Sequence: Synthetic peptide
  N-term Pr
  MOD_RES (8)..(8): Alpha-Me S5-pentenyl-alanine olefin amino acid connected by an all-carbon crosslinker comprising one double bond
  MISC_FEATURE (8)..(12): Crosslink between residues
  MOD_RES (12)..(12): Alpha-Me S5-pentenyl-alanine olefin amino acid connected by an all-carbon crosslinker comprising one double bond
  C-term NH2
WIAQQLRAIGDAVNASYARR

SEQ ID NO: 723 - protein, 21 aa, Artificial Sequence
  Description of Artificial Sequence: Synthetic peptide
  N-term Ac
  MOD_RES (9)..(9): Alpha-Me S5-pentenyl-alanine olefin amino acid connected by an all-carbon crosslinker comprising one double bond
  MISC_FEATURE (9)..(13): Crosslink between residues
  MOD_RES (13)..(13): Alpha-Me S5-pentenyl-alanine olefin amino acid connected by an all-carbon crosslinker comprising one double bond
  C-term NH2
RWIAQQLRAIGDAVNAFYAHH

SEQ ID NO: 724 - protein, 19 aa, Artificial Sequence
  Description of Artificial Sequence: Synthetic peptide
  N-term Pr
  MOD_RES (8)..(8): Alpha-Me S5-pentenyl-alanine olefin amino acid connected by an all-carbon crosslinker comprising one double bond
  MISC_FEATURE (8)..(12): Crosslink between residues
  MOD_RES (12)..(12): Alpha-Me S5-pentenyl-alanine olefin amino acid connected by an all-carbon crosslinker comprising one double bond
  C-term NH2
WIAQQLRAIGDAVNAFYAR

SEQ ID NO: 725 - protein, 20 aa, Artificial Sequence
  Description of Artificial Sequence: Synthetic peptide
  N-term Pr
  MOD_RES (8)..(8): Alpha-Me S5-pentenyl-alanine olefin amino acid connected by an all-carbon crosslinker comprising one double bond
  MISC_FEATURE (8)..(12): Crosslink between residues
  MOD_RES (12)..(12): Alpha-Me S5-pentenyl-alanine olefin amino acid connected by an all-carbon crosslinker comprising one double bond
  C-term NH2
WIAQQLRAIGDAFNAFYAHH

SEQ ID NO: 726 - protein, 20 aa, Artificial Sequence
  Description of Artificial Sequence: Synthetic peptide
  N-term Pr
  MOD_RES (8)..(8): Alpha-Me S5-pentenyl-alanine olefin amino acid connected by an all-carbon crosslinker comprising one double bond
  MISC_FEATURE (8)..(12): Crosslink between residues
  MOD_RES (12)..(12): Alpha-Me S5-pentenyl-alanine olefin amino acid connected by an all-carbon crosslinker comprising one double bond
  C-term NH2
WIAQQLRAIGDAFNAFYARH

SEQ ID NO: 727 - protein, 20 aa, Artificial Sequence
  Description of Artificial Sequence: Synthetic peptide
  N-term Pr
  MOD_RES (8)..(8): Alpha-Me S5-pentenyl-alanine olefin amino acid connected by an all-carbon crosslinker comprising one double bond
  MISC_FEATURE (8)..(12): Crosslink between residues
  MOD_RES (12)..(12): Alpha-Me S5-pentenyl-alanine olefin amino acid connected by an all-carbon crosslinker comprising one double bond
  C-term NH2
WIAQQLRAIGDAFNAFYAHR

SEQ ID NO: 728 - protein, 21 aa, Artificial Sequence
  Description of Artificial Sequence: Synthetic peptide
  N-term Ac
  MOD_RES (4)..(4): Universal 13C, 15N labeled alanine
  MOD_RES (7)..(7): Universal 13C, 15N labeled leucine
  MOD_RES (9)..(9): Alpha-Me S5-pentenyl-alanine olefin amino acid connected by an all-carbon crosslinker comprising one double bond
  MISC_FEATURE (9)..(13): Crosslink between residues
  MOD_RES (13)..(13): Alpha-Me S5-pentenyl-alanine olefin amino acid connected by an all-carbon crosslinker comprising one double bond
  C-term NH2
RWIAQALRAIGDAFNAFYARR

SEQ ID NO: 729 - protein, 20 aa, Artificial Sequence
  Description of Artificial Sequence: Synthetic peptide
  N-term Pr
  MOD_RES (8)..(8): Alpha-Me S5-pentenyl-alanine olefin amino acid connected by an all-carbon crosslinker comprising one double bond
  MISC_FEATURE (8)..(12): Crosslink between residues
  MOD_RES (12)..(12): Alpha-Me S5-pentenyl-alanine olefin amino acid connected by an all-carbon crosslinker comprising one double bond
  C-term NH2
WIAQQLRAIGDALNAYYARR

SEQ ID NO: 730 - protein, 20 aa, Artificial Sequence
  Description of Artificial Sequence: Synthetic peptide
  N-term Pr
  MOD_RES (8)..(8): Alpha-Me S5-pentenyl-alanine olefin amino acid connected by an all-carbon crosslinker comprising one double bond
  MISC_FEATURE (8)..(12): Crosslink between residues
  MOD_RES (12)..(12): Alpha-Me S5-pentenyl-alanine olefin amino acid connected by an all-carbon crosslinker comprising one double bond
  C-term NH2
WIAQQLRAIGDALNASYARR

SEQ ID NO: 731 - protein, 20 aa, Artificial Sequence
  Description of Artificial Sequence: Synthetic peptide
  N-term Pr
  MOD_RES (8)..(8): Alpha-Me S5-pentenyl-alanine olefin amino acid connected by an all-carbon crosslinker comprising one double bond
  MISC_FEATURE (8)..(12): Crosslink between residues
  MOD_RES (12)..(12): Alpha-Me S5-pentenyl-alanine olefin amino acid connected by an all-carbon crosslinker comprising one double bond
  C-term NH2
WIAQQLRAIGDALNAYYARH

SEQ ID NO: 732 - protein, 20 aa, Artificial Sequence
  Description of Artificial Sequence: Synthetic peptide
  N-term Pr
  MOD_RES (8)..(8): Alpha-Me S5-pentenyl-alanine olefin amino acid connected by an all-carbon crosslinker comprising one double bond
  MISC_FEATURE (8)..(12): Crosslink between residues
  MOD_RES (12)..(12): Alpha-Me S5-pentenyl-alanine olefin amino acid connected by an all-carbon crosslinker comprising one double bond
  C-term NH2
WIAQQLRAIGDALNAYYAHR

SEQ ID NO: 733 - protein, 20 aa, Artificial Sequence
  Description of Artificial Sequence: Synthetic peptide
  N-term Pr
  MOD_RES (8)..(8): Alpha-Me S5-pentenyl-alanine olefin amino acid connected by an all-carbon crosslinker comprising one double bond
  MISC_FEATURE (8)..(12): Crosslink between residues
  MOD_RES (12)..(12): Alpha-Me S5-pentenyl-alanine olefin amino acid connected by an all-carbon crosslinker comprising one double bond
  C-term NH2
RIAQQLRAIGDALNAYYARH

SEQ ID NO: 734 - protein, 20 aa, Artificial Sequence
  Description of Artificial Sequence: Synthetic peptide
  N-term Pr
  MOD_RES (8)..(8): Alpha-Me S5-pentenyl-alanine olefin amino acid connected by an all-carbon crosslinker comprising one double bond
  MISC_FEATURE (8)..(12): Crosslink between residues
  MOD_RES (12)..(12): Alpha-Me S5-pentenyl-alanine olefin amino acid connected by an all-carbon crosslinker comprising one double bond
  C-term NH2
RIAQQLRAIGDALNAYYAHR

SEQ ID NO: 735 - protein, 20 aa, Artificial Sequence
  Description of Artificial Sequence: Synthetic peptide
  N-term Pr
  MOD_RES (8)..(8): Alpha-Me S5-pentenyl-alanine olefin amino acid connected by an all-carbon crosslinker comprising one double bond
  MISC_FEATURE (8)..(12): Crosslink between residues
  MOD_RES (12)..(12): Alpha-Me S5-pentenyl-alanine olefin amino acid connected by an all-carbon crosslinker comprising one double bond
  C-term NH2
RIAQQLRAIGDALNAYYAHH

SEQ ID NO: 736 - protein, 20 aa, Artificial Sequence
  Description of Artificial Sequence: Synthetic peptide
  N-term Pr
  MOD_RES (8)..(8): Alpha-Me S5-pentenyl-alanine olefin amino acid connected by an all-carbon crosslinker comprising one double bond
  MISC_FEATURE (8)..(12): Crosslink between residues
  MOD_RES (12)..(12): Alpha-Me S5-pentenyl-alanine olefin amino acid connected by an all-carbon crosslinker comprising one double bond
  C-term NH2
SIAQQLRAIGDALNAYYARR

SEQ ID NO: 737 - protein, 20 aa, Artificial Sequence
  Description of Artificial Sequence: Synthetic peptide
  N-term Pr
  MOD_RES (1)..(1): 2-aminoisobutyric acid
  MOD_RES (8)..(8): Alpha-Me S5-pentenyl-alanine olefin amino acid connected by an all-carbon crosslinker comprising one double bond
  MISC_FEATURE (8)..(12): Crosslink between residues
  MOD_RES (12)..(12): Alpha-Me S5-pentenyl-alanine olefin amino acid connected by an all-carbon crosslinker comprising one double bond
  C-term NH2
XIAQQLRAIGDALNAYYARR

SEQ ID NO: 738 - protein, 20 aa, Artificial Sequence
  Description of Artificial Sequence: Synthetic peptide
  N-term Pr
  MOD_RES (8)..(8): Alpha-Me S5-pentenyl-alanine olefin amino acid connected by an all-carbon crosslinker comprising one double bond
  MISC_FEATURE (8)..(12): Crosslink between residues
  MOD_RES (12)..(12): Alpha-Me S5-pentenyl-alanine olefin amino acid connected by an all-carbon crosslinker comprising one double bond
  C-term NH2
YIAQQLRAIGDALNAYYARR

SEQ ID NO: 739 - protein, 19 aa, Artificial Sequence
  Description of Artificial Sequence: Synthetic peptide
  N-term Pr
  MOD_RES (8)..(8): Alpha-Me S5-pentenyl-alanine olefin amino acid connected by an all-carbon crosslinker comprising one double bond
  MISC_FEATURE (8)..(12): Crosslink between residues
  MOD_RES (12)..(12): Alpha-Me S5-pentenyl-alanine olefin amino acid connected by an all-carbon crosslinker comprising one double bond
  C-term NH2
RIAQQLRAIGDALNAYYAR

SEQ ID NO: 740 - protein, 21 aa, Artificial Sequence
  Description of Artificial Sequence: Synthetic peptide
  N-term Ac
  MOD_RES (9)..(9): Alpha-Me S5-pentenyl-alanine olefin amino acid connected by an all-carbon crosslinker comprising one double bond
  MISC_FEATURE (9)..(13): Crosslink between residues
  MOD_RES (13)..(13): Alpha-Me S5-pentenyl-alanine olefin amino acid connected by an all-carbon crosslinker comprising one double bond
  C-term NH2
RSIAQQLRAIGDALNAYYARR

SEQ ID NO: 741 - protein, 21 aa, Artificial Sequence
  Description of Artificial Sequence: Synthetic peptide
  N-term Ac
  MOD_RES (9)..(9): Alpha-Me R5-pentenyl-alanine olefin amino acid connected by an all-carbon crosslinker comprising one double bond
  MISC_FEATURE (9)..(13): Crosslink between residues
  MOD_RES (13)..(13): Two pentenyl-alanine olefin side chains, each of which is crosslinked to another amino acid as indicated
  MISC_FEATURE (13)..(17): Crosslink between residues
  MOD_RES (17)..(17): Alpha-Me S5-pentenyl-alanine olefin amino acid connected by an all-carbon crosslinker comprising one double bond
  C-term NH2
IWIAQELRAIGDAFNAAYARR

SEQ ID NO: 742 - protein, 20 aa, Artificial Sequence
  Description of Artificial Sequence: Synthetic peptide
  N-term Pr
  MOD_RES (8)..(8): Alpha-Me R5-pentenyl-alanine olefin amino acid connected by an all-carbon crosslinker comprising one double bond
  MISC_FEATURE (8)..(12): Crosslink between residues
  MOD_RES (12)..(12): Two pentenyl-alanine olefin side chains, each of which is crosslinked to another amino acid as indicated
  MISC_FEATURE (12)..(16): Crosslink between residues
  MOD_RES (16)..(16): Alpha-Me S5-pentenyl-alanine olefin amino acid connected by an all-carbon crosslinker comprising one double bond
  C-term NH2
SIAQQLRAIGDAFNAAYARR

SEQ ID NO: 743 - protein, 21 aa, Artificial Sequence
  Description of Artificial Sequence: Synthetic peptide
  N-term Ac
  MOD_RES (5)..(5): Alpha-Me R5-pentenyl-alanine olefin amino acid connected by an all-carbon crosslinker comprising one double bond
  MISC_FEATURE (5)..(9): Crosslink between residues
  MOD_RES (9)..(9): Two pentenyl-alanine olefin side chains, each of which is crosslinked to another amino acid as indicated
  MISC_FEATURE (9)..(13): Crosslink between residues
  MOD_RES (13)..(13): Alpha-Me S5-pentenyl-alanine olefin amino acid connected by an all-carbon crosslinker comprising one double bond
  C-term NH2
RWIAAALRADILAFNAFYARR

SEQ ID NO: 744 - protein, 21 aa, Artificial Sequence
  Description of Artificial Sequence: Synthetic peptide
  N-term Ac
  MOD_RES (9)..(9): Alpha-Me alkyne 1,5 triazole (5 carbon) amino acid
  MISC_FEATURE (9)..(13): Crosslink between residues
  MOD_RES (13)..(13): Alpha-Me azide 1,5 triazole (3 carbon) amino acid
  C-term NH2
RWIAQALRXDILXFNAFYARR

SEQ ID NO: 745 - protein, 20 aa, Artificial Sequence
  Description of Artificial Sequence: Synthetic peptide
  N-term Ac
  MOD_RES (9)..(9): Alpha-Me S5-pentenyl-alanine olefin amino acid connected by an all-carbon crosslinker comprising one double bond
  MISC_FEATURE (9)..(13): Crosslink between residues
  MOD_RES (13)..(13): Alpha-Me S5-pentenyl-alanine olefin amino acid connected by an all-carbon crosslinker comprising one double bond
  C-term NH2
RWIAQQLRAIGDAFNAYYAH

SEQ ID NO: 746 - protein, 21 aa, Artificial Sequence
  Description of Artificial Sequence: Synthetic peptide
  N-term Ac
  MOD_RES (5)..(5): Alpha-Me R5-pentenyl-alanine olefin amino acid connected by an all-carbon crosslinker comprising one double bond
  MISC_FEATURE (5)..(9): Crosslink between residues
  MOD_RES (9)..(9): Two pentenyl-alanine olefin side chains, each of which is crosslinked to another amino acid as indicated
  MISC_FEATURE (9)..(13): Crosslink between residues
  MOD_RES (13)..(13): Alpha-Me S5-pentenyl-alanine olefin amino acid connected by an all-carbon crosslinker comprising one double bond
  C-term NH2
RWIAAALRAIDLAFNAFYARR

SEQ ID NO: 747 - protein, 21 aa, Artificial Sequence
  Description of Artificial Sequence: Synthetic peptide
  N-term Ac
  MOD_RES (9)..(9): Alpha-Me alkyne 1,5 triazole (5 carbon) amino acid
  MISC_FEATURE (9)..(13): Crosslink between residues
  MOD_RES (13)..(13): Alpha-Me azide 1,5 triazole (3 carbon) amino acid
  C-term NH2
RWIAQALRXILLXFNAFYARR

SEQ ID NO: 748 - protein, 20 aa, Artificial Sequence
  Description of Artificial Sequence: Synthetic peptide
  N-term Pr
  MOD_RES (8)..(8): Alpha-Me S5-pentenyl-alanine olefin amino acid connected by an all-carbon crosslinker comprising one double bond
  MISC_FEATURE (8)..(12): Crosslink between residues
  MOD_RES (12)..(12): Alpha-Me S5-pentenyl-alanine olefin amino acid connected by an all-carbon crosslinker comprising one double bond
  C-term NH2
RIAQQLRAIGDAFNAYYAHH

SEQ ID NO: 749 - protein, 20 aa, Artificial Sequence
  Description of Artificial Sequence: Synthetic peptide
  N-term Pr
  MOD_RES (8)..(8): Alpha-Me S5-pentenyl-alanine olefin amino acid connected by an all-carbon crosslinker comprising one double bond
  MISC_FEATURE (8)..(12): Crosslink between residues
  MOD_RES (12)..(12): Alpha-Me S5-pentenyl-alanine olefin amino acid connected by an all-carbon crosslinker comprising one double bond
  C-term NH2
WIAQQLRAIGDAVNAYYAHR

SEQ ID NO: 750 - protein, 20 aa, Artificial Sequence
  Description of Artificial Sequence: Synthetic peptide
  N-term Pr
  MOD_RES (8)..(8): Alpha-Me S5-pentenyl-alanine olefin amino acid connected by an all-carbon crosslinker comprising one double bond
  MISC_FEATURE (8)..(12): Crosslink between residues
  MOD_RES (12)..(12): Alpha-Me S5-pentenyl-alanine olefin amino acid connected by an all-carbon crosslinker comprising one double bond
  C-term NH2
WIAQQLRAIGDAVNAFYAHR

SEQ ID NO: 751 - protein, 20 aa, Artificial Sequence
  Description of Artificial Sequence: Synthetic peptide
  N-term Pr
  MOD_RES (8)..(8): Alpha-Me S5-pentenyl-alanine olefin amino acid connected by an all-carbon crosslinker comprising one double bond
  MISC_FEATURE (8)..(12): Crosslink between residues
  MOD_RES (12)..(12): Alpha-Me S5-pentenyl-alanine olefin amino acid connected by an all-carbon crosslinker comprising one double bond
  C-term NH2
RIAQQLRAIGDAVNAYYAHR

SEQ ID NO: 752 - protein, 21 aa, Artificial Sequence
  Description of Artificial Sequence: Synthetic peptide
  N-term Ac
  MOD_RES (9)..(9): Alpha-Me azide 1,5 triazole (3 carbon) amino acid
  MISC_FEATURE (9)..(13): Crosslink between residues
  MOD_RES (13)..(13): Alpha-Me alkyne 1,5 triazole (5 carbon) amino acid
  C-term NH2
RWIAQALRXDILXFNAFYARR

SEQ ID NO: 753 - protein, 21 aa, Artificial Sequence
  Description of Artificial Sequence: Synthetic peptide
  N-term Ac
  MOD_RES (2)..(2): Alpha-Me R8-octenyl-alanine olefin amino acid connected by an all-carbon crosslinker comprising one double bond
  MISC_FEATURE (2)..(9): Crosslink between residues
  MOD_RES (9)..(9): Two pentenyl-alanine olefin side chains, each of which is crosslinked to another amino acid as indicated
  MISC_FEATURE (9)..(16): Crosslink between residues
  MOD_RES (16)..(16): Alpha-Me S8-octenyl-alanine olefin amino acid connected by an all-carbon crosslinker comprising one double bond
  C-term NH2
RAIAQALRAIGDLFNAFYARR

SEQ ID NO: 754 - protein, 19 aa, Artificial Sequence
  Description of Artificial Sequence: Synthetic peptide
  N-term Pr
  MOD_RES (8)..(8): Alpha-Me S5-pentenyl-alanine olefin amino acid connected by an all-carbon crosslinker comprising one double bond
  MISC_FEATURE (8)..(12): Crosslink between residues
  MOD_RES (12)..(12): Alpha-Me S5-pentenyl-alanine olefin amino acid connected by an all-carbon crosslinker comprising one double bond
  C-term NH2
RIAQQLRAIGDAFNAYYAH

SEQ ID NO: 755 - protein, 21 aa, Artificial Sequence
  Description of Artificial Sequence: Synthetic peptide
  N-term Ac
  MOD_RES (9)..(9): Alpha-Me azide 1,5 triazole (3 carbon) amino acid
  MISC_FEATURE (9)..(13): Crosslink between residues
  MOD_RES (13)..(13): Alpha-Me alkyne 1,5 triazole (5 carbon) amino acid
  C-term NH2
RWIAQALRXILLXFNAFYARR

SEQ ID NO: 756 - protein, 20 aa, Artificial Sequence
  Description of Artificial Sequence: Synthetic peptide
  N-term Ac
  MOD_RES (9)..(9): Alpha-Me S5-pentenyl-alanine olefin amino acid connected by an all-carbon crosslinker comprising one double bond
  MISC_FEATURE (9)..(13): Crosslink between residues
  MOD_RES (13)..(13): Alpha-Me S5-pentenyl-alanine olefin amino acid connected by an all-carbon crosslinker comprising one double bond
  C-term NH2
RAIAQQLRAIGDAFNAYYAH

SEQ ID NO: 757 - protein, 20 aa, Artificial Sequence
  Description of Artificial Sequence: Synthetic peptide
  N-term Pr
  MOD_RES (8)..(8): Alpha-Me S5-pentenyl-alanine olefin amino acid connected by an all-carbon crosslinker comprising one double bond
  MISC_FEATURE (8)..(12): Crosslink between residues
  MOD_RES (12)..(12): Alpha-Me S5-pentenyl-alanine olefin amino acid connected by an all-carbon crosslinker comprising one double bond
  C-term NH2
WIAQQLRAIGDALNAYYAHH

SEQ ID NO: 758 - protein, 20 aa, Artificial Sequence
  Description of Artificial Sequence: Synthetic peptide
  N-term Pr
  MOD_RES (8)..(8): Alpha-Me S5-pentenyl-alanine olefin amino acid connected by an all-carbon crosslinker comprising one double bond
  MISC_FEATURE (8)..(12): Crosslink between residues
  MOD_RES (12)..(12): Alpha-Me S5-pentenyl-alanine olefin amino acid connected by an all-carbon crosslinker comprising one double bond
  C-term NH2
SIAQQLRAIGDALNAYYAHR

SEQ ID NO: 759 - protein, 21 aa, Artificial Sequence
  Description of Artificial Sequence: Synthetic peptide
  N-term Ac
  MOD_RES (9)..(9): Alpha-Me S5-pentenyl-alanine olefin amino acid connected by an all-carbon crosslinker comprising one double bond
  MISC_FEATURE (9)..(13): Crosslink between residues
  MOD_RES (13)..(13): Alpha-Me S5-pentenyl-alanine olefin amino acid connected by an all-carbon crosslinker comprising one double bond
  C-term NH2
RWIAQQLRAIGDAVNAFYAHR

SEQ ID NO: 760 - protein, 21 aa, Artificial Sequence
  Description of Artificial Sequence: Synthetic peptide
  N-term Ac
  MOD_RES (5)..(5): Alpha-Me S5-pentenyl-alanine olefin amino acid connected by an all-carbon crosslinker comprising one double bond
  MISC_FEATURE (5)..(9): Crosslink between residues
  MOD_RES (9)..(9): Two pentenyl-alanine olefin side chains, each of which is crosslinked to another amino acid as indicated
  MISC_FEATURE (9)..(13): Crosslink between residues
  MOD_RES (13)..(13): Alpha-Me R5-pentenyl-alanine olefin amino acid connected by an all-carbon crosslinker comprising one double bond
  C-term NH2
IWIAAQLRAIGDAFNAYYARR

SEQ ID NO: 761 - protein, 21 aa, Artificial Sequence
  Description of Artificial Sequence: Synthetic peptide
  N-term Ac
  MOD_RES (5)..(5): Alpha-Me S5-pentenyl-alanine olefin amino acid connected by an all-carbon crosslinker comprising one double bond
  MISC_FEATURE (5)..(9): Crosslink between residues
  MOD_RES (9)..(9): Two pentenyl-alanine olefin side chains, each of which is crosslinked to another amino acid as indicated
  MISC_FEATURE (9)..(13): Crosslink between residues
  MOD_RES (13)..(13): Alpha-Me R5-pentenyl-alanine olefin amino acid connected by an all-carbon crosslinker comprising one double bond
  C-term NH2
RWIAAQLRAIGDAFNAYYARR

SEQ ID NO: 762 - protein, 21 aa, Artificial Sequence
  Description of Artificial Sequence: Synthetic peptide
  N-term Ac
  MOD_RES (9)..(9): Alpha-Me S5-pentenyl-alanine olefin amino acid connected by an all-carbon crosslinker comprising one double bond
  MISC_FEATURE (9)..(13): Crosslink between residues
  MOD_RES (13)..(13): Alpha-Me S5-pentenyl-alanine olefin amino acid connected by an all-carbon crosslinker comprising one double bond
  MOD_RES (16)..(16): 2-aminoisobutyric acid
  C-term NH2
RWIAQQLRAIGDAFNXFYAHH

SEQ ID NO: 763 - protein, 21 aa, Artificial Sequence
  Description of Artificial Sequence: Synthetic peptide
  N-term Ac
  MOD_RES (9)..(9): Alpha-Me S5-pentenyl-alanine olefin amino acid connected by an all-carbon crosslinker comprising one double bond
  MISC_FEATURE (9)..(13): Crosslink between residues
  MOD_RES (13)..(13): Alpha-Me S5-pentenyl-alanine olefin amino acid connected by an all-carbon crosslinker comprising one double bond
  MOD_RES (16)..(16): 2-aminoisobutyric acid
  C-term NH2
RWIAQALRAIGDALNXFYAHH

SEQ ID NO: 764 - protein, 21 aa, Artificial Sequence
  Description of Artificial Sequence: Synthetic peptide
  N-term Ac
  MOD_RES (5)..(5): Alpha-Me S5-pentenyl-alanine olefin amino acid connected by an all-carbon crosslinker comprising one double bond
  MISC_FEATURE (5)..(9): Crosslink between residues
  MOD_RES (9)..(9): Two pentenyl-alanine olefin side chains, each of which is crosslinked to another amino acid as indicated
  MISC_FEATURE (9)..(13): Crosslink between residues
  MOD_RES (13)..(13): Alpha-Me R5-pentenyl-alanine olefin amino acid connected by an all-carbon crosslinker comprising one double bond
  C-term NH2
IWIAAALRAIGDALNAYYARR

SEQ ID NO: 765 - protein, 21 aa, Artificial Sequence
  Description of Artificial Sequence: Synthetic peptide
  N-term Ac
  MOD_RES (9)..(9): Alpha-Me S5-pentenyl-alanine olefin amino acid connected by an all-carbon crosslinker comprising one double bond
  MISC_FEATURE (9)..(13): Crosslink between residues
  MOD_RES (13)..(13): Two pentenyl-alanine olefin side chains, each of which is crosslinked to another amino acid as indicated
  MISC_FEATURE (13)..(17): Crosslink between residues
  MOD_RES (17)..(17): Alpha-Me R5-pentenyl-alanine olefin amino acid connected by an all-carbon crosslinker comprising one double bond
  C-term NH2
IWIAQALRAIGDAFNAAYAHH

SEQ ID NO: 766 - protein, 21 aa, Artificial Sequence
  Description of Artificial Sequence: Synthetic peptide
  N-term Ac
  MOD_RES (5)..(5): Alpha-Me S5-pentenyl-alanine olefin amino acid connected by an all-carbon crosslinker comprising one double bond
  MISC_FEATURE (5)..(9): Crosslink between residues
  MOD_RES (9)..(9): Two pentenyl-alanine olefin side chains, each of which is crosslinked to another amino acid as indicated
  MISC_FEATURE (9)..(13): Crosslink between residues
  MOD_RES (13)..(13): Alpha-Me R5-pentenyl-alanine olefin amino acid connected by an all-carbon crosslinker comprising one double bond
  C-term NH2
RWIAAALRAIGDAFNAYYARR

SEQ ID NO: 767 - protein, 20 aa, Artificial Sequence
  Description of Artificial Sequence: Synthetic peptide
  N-term Pr
  MOD_RES (8)..(8): Alpha-Me S5-pentenyl-alanine olefin amino acid connected by an all-carbon crosslinker comprising one double bond
  MISC_FEATURE (8)..(12): Crosslink between residues
  MOD_RES (12)..(12): Alpha-Me S5-pentenyl-alanine olefin amino acid connected by an all-carbon crosslinker comprising one double bond
  C-term NH2
WIAQQLRAIGDAFNAYYAHH

SEQ ID NO: 768 - protein, 20 aa, Artificial Sequence
  Description of Artificial Sequence: Synthetic peptide
  N-term Pr
  MOD_RES (8)..(8): Alpha-Me S5-pentenyl-alanine olefin amino acid connected by an all-carbon crosslinker comprising one double bond
  MISC_FEATURE (8)..(12): Crosslink between residues
  MOD_RES (12)..(12): Alpha-Me S5-pentenyl-alanine olefin amino acid connected by an all-carbon crosslinker comprising one double bond
  C-term NH2
SIAQQLRAIGDAFNAFYARR

SEQ ID NO: 769 - protein, 20 aa, Artificial Sequence
  Description of Artificial Sequence: Synthetic peptide
  N-term Ac
  MOD_RES (8)..(8): Alpha-Me S5-pentenyl-alanine olefin amino acid connected by an all-carbon crosslinker comprising one double bond
  MISC_FEATURE (8)..(12): Crosslink between residues
  MOD_RES (12)..(12): Alpha-Me S5-pentenyl-alanine olefin amino acid connected by an all-carbon crosslinker comprising one double bond
  MOD_RES (15)..(15): 2-aminoisobutyric acid
  C-term NH2
WIAQQLRAIGDAFNXFYAHH

SEQ ID NO: 770 - protein, 21 aa, Artificial Sequence
  Description of Artificial Sequence: Synthetic peptide
  N-term Ac
  MOD_RES (9)..(9): Alpha-Me S5-pentenyl-alanine olefin amino acid connected by an all-carbon crosslinker comprising one double bond
  MISC_FEATURE (9)..(13): Crosslink between residues
  MOD_RES (13)..(13): Alpha-Me S5-pentenyl-alanine olefin amino acid connected by an all-carbon crosslinker comprising one double bond
  MOD_RES (16)..(16): 2-aminoisobutyric acid
  C-term NH2
RWIAQALRAIGDAVNXFYAHH

SEQ ID NO: 771 - protein, 21 aa, Artificial Sequence
  Description of Artificial Sequence: Synthetic peptide
  N-term Ac
  MOD_RES (9)..(9): Alpha-Me S5-pentenyl-alanine olefin amino acid connected by an all-carbon crosslinker comprising one double bond
  MISC_FEATURE (9)..(13): Crosslink between residues
  MOD_RES (13)..(13): Alpha-Me S5-pentenyl-alanine olefin amino acid connected by an all-carbon crosslinker comprising one double bond
  MOD_RES (16)..(16): 2-aminoisobutyric acid
  C-term NH2
IWIAQQLRAIGDAFNXFYAHH

SEQ ID NO: 772 - protein, 21 aa, Artificial Sequence
  Description of Artificial Sequence: Synthetic peptide
  N-term Ac
  MOD_RES (9)..(9): Alpha-Me S5-pentenyl-alanine olefin amino acid connected by an all-carbon crosslinker comprising one double bond
  MISC_FEATURE (9)..(13): Crosslink between residues
  MOD_RES (13)..(13): Alpha-Me S5-pentenyl-alanine olefin amino acid connected by an all-carbon crosslinker comprising one double bond
  MOD_RES (16)..(16): 2-aminoisobutyric acid
  C-term NH2
IWIAQALRAIGDAVNXFYAHH

SEQ ID NO: 773 - protein, 21 aa, Artificial Sequence
  Description of Artificial Sequence: Synthetic peptide
  N-term Ac
  MOD_RES (9)..(9): Alpha-Me S5-pentenyl-alanine olefin amino acid connected by an all-carbon crosslinker comprising one double bond
  MISC_FEATURE (9)..(13): Crosslink between residues
  MOD_RES (13)..(13): Alpha-Me S5-pentenyl-alanine olefin amino acid connected by an all-carbon crosslinker comprising one double bond
  MOD_RES (16)..(16): 2-aminoisobutyric acid
  C-term NH2
IWIAQALRAIGDALNXFYAHH

SEQ ID NO: 774 - protein, 16 aa, Artificial Sequence
  Description of Artificial Sequence: Synthetic peptide
  N-term Ac
  MOD_RES (4)..(4): Alpha-Me R5-pentenyl-alanine olefin amino acid connected by an all-carbon crosslinker comprising one double bond
  MISC_FEATURE (4)..(8): Crosslink between residues
  MOD_RES (8)..(8): Two pentenyl-alanine olefin side chains, each of which is crosslinked to another amino acid as indicated
  MISC_FEATURE (8)..(12): Crosslink between residues
  MOD_RES (12)..(12): Alpha-Me S5-pentenyl-alanine olefin amino acid connected by an all-carbon crosslinker comprising one double bond
  C-term NH2
ELRAIGDAFNAAYARR

SEQ ID NO: 775 - protein, 17 aa, Artificial Sequence
  Description of Artificial Sequence: Synthetic peptide
  N-term Ac
  MOD_RES (5)..(5): Alpha-Me R5-pentenyl-alanine olefin amino acid connected by an all-carbon crosslinker comprising one double bond
  MISC_FEATURE (5)..(9): Crosslink between residues
  MOD_RES (9)..(9): Two pentenyl-alanine olefin side chains, each of which is crosslinked to another amino acid as indicated
  MISC_FEATURE (9)..(13): Crosslink between residues
  MOD_RES (13)..(13): Alpha-Me S5-pentenyl-alanine olefin amino acid connected by an all-carbon crosslinker comprising one double bond
  C-term NH2
QELRAIGDAFNAAYARR

SEQ ID NO: 776 - protein, 18 aa, Artificial Sequence
  Description of Artificial Sequence: Synthetic peptide
  N-term Ac
  MOD_RES (6)..(6): Alpha-Me R5-pentenyl-alanine olefin amino acid connected by an all-carbon crosslinker comprising one double bond
  MISC_FEATURE (6)..(10): Crosslink between residues
  MOD_RES (10)..(10): Two pentenyl-alanine olefin side chains, each of which is crosslinked to another amino acid as indicated
  MISC_FEATURE (10)..(14): Crosslink between residues
  MOD_RES (14)..(14): Alpha-Me S5-pentenyl-alanine olefin amino acid connected by an all-carbon crosslinker comprising one double bond
  C-term NH2
AQELRAIGDAFNAAYARR

SEQ ID NO: 777 - protein, 19 aa, Artificial Sequence
  Description of Artificial Sequence: Synthetic peptide
  N-term Ac
  MOD_RES (7)..(7): Alpha-Me R5-pentenyl-alanine olefin amino acid connected by an all-carbon crosslinker comprising one double bond
  MISC_FEATURE (7)..(11): Crosslink between residues
  MOD_RES (11)..(11): Two pentenyl-alanine olefin side chains, each of which is crosslinked to another amino acid as indicated
  MISC_FEATURE (11)..(15): Crosslink between residues
  MOD_RES (15)..(15): Alpha-Me S5-pentenyl-alanine olefin amino acid connected by an all-carbon crosslinker comprising one double bond
  C-term NH2
IAQELRAIGDAFNAAYARR

SEQ ID NO: 778 - protein, 21 aa, Artificial Sequence
  Description of Artificial Sequence: Synthetic peptide
  N-term Ac
  MOD_RES (9)..(9): Alpha-Me R5-pentenyl-alanine olefin amino acid connected by an all-carbon crosslinker comprising one double bond
  MISC_FEATURE (9)..(13): Crosslink between residues
  MOD_RES (13)..(13): Two pentenyl-alanine olefin side chains, each of which is crosslinked to another amino acid as indicated
  MISC_FEATURE (13)..(17): Crosslink between residues
  MOD_RES (17)..(17): Alpha-Me S5-pentenyl-alanine olefin amino acid connected by an all-carbon crosslinker comprising one double bond
  C-term NH2
RWIAQALRAIGDAFNAAYAHH

SEQ ID NO: 779 - protein, 21 aa, Artificial Sequence
  Description of Artificial Sequence: Synthetic peptide
  N-term Ac
  MOD_RES (9)..(9): Alpha-Me R5-pentenyl-alanine olefin amino acid connected by an all-carbon crosslinker comprising one double bond
  MISC_FEATURE (9)..(13): Crosslink between residues
  MOD_RES (13)..(13): Two pentenyl-alanine olefin side chains, each of which is crosslinked to another amino acid as indicated
  MISC_FEATURE (13)..(17): Crosslink between residues
  MOD_RES (17)..(17): Alpha-Me S5-pentenyl-alanine olefin amino acid connected by an all-carbon crosslinker comprising one double bond
  C-term NH2
RWIAQQLRAIGDAFNAAYAHH

SEQ ID NO: 780 - protein, 21 aa, Artificial Sequence
  Description of Artificial Sequence: Synthetic peptide
  N-term Ac
  MOD_RES (9)..(9): Alpha-Me S5-pentenyl-alanine olefin amino acid connected by an all-carbon crosslinker comprising one double bond
  MISC_FEATURE (9)..(13): Crosslink between residues
  MOD_RES (13)..(13): Two pentenyl-alanine olefin side chains, each of which is crosslinked to another amino acid as indicated
  MISC_FEATURE (13)..(17): Crosslink between residues
  MOD_RES (17)..(17): Alpha-Me R5-pentenyl-alanine olefin amino acid connected by an all-carbon crosslinker comprising one double bond
  C-term NH2
RWIAQALRAIGDAFNAAYAHH

SEQ ID NO: 781 - protein, 21 aa, Artificial Sequence
  Description of Artificial Sequence: Synthetic peptide
  N-term Ac
  MOD_RES (9)..(9): Alpha-Me S5-pentenyl-alanine olefin amino acid connected by an all-carbon crosslinker comprising one double bond
  MISC_FEATURE (9)..(13): Crosslink between residues
  MOD_RES (13)..(13): Two pentenyl-alanine olefin side chains, each of which is crosslinked to another amino acid as indicated
  MISC_FEATURE (13)..(17): Crosslink between residues
  MOD_RES (17)..(17): Alpha-Me R5-pentenyl-alanine olefin amino acid connected by an all-carbon crosslinker comprising one double bond
  C-term NH2
RWIAQQLRAIGDAFNAAYAHH

SEQ ID NO: 782 - protein, 21 aa, Artificial Sequence
  Description of Artificial Sequence: Synthetic peptide
  N-term Ac
  MOD_RES (9)..(9): Alpha-Me S5-pentenyl-alanine olefin amino acid connected by an all-carbon crosslinker comprising one double bond
  MISC_FEATURE (9)..(13): Crosslink between residues
  MOD_RES (13)..(13): Alpha-Me S5-pentenyl-alanine olefin amino acid connected by an all-carbon crosslinker comprising one double bond
  C-term NH2
IWIAQQFRAIGDAFNAYYARR

SEQ ID NO: 783 - protein, 21 aa, Artificial Sequence
  Description of Artificial Sequence: Synthetic peptide
  N-term Ac
  MOD_RES (9)..(9): Alpha-Me S5-pentenyl-alanine olefin amino acid connected by an all-carbon crosslinker comprising one double bond
  MISC_FEATURE (9)..(13): Crosslink between residues
  MOD_RES (13)..(13): Alpha-Me S5-pentenyl-alanine olefin amino acid connected by an all-carbon crosslinker comprising one double bond
  C-term NH2
RWIAQQFRAIGDAFNAFYAHH

SEQ ID NO: 784 - protein, 21 aa, Artificial Sequence
  Description of Artificial Sequence: Synthetic peptide
  N-term Ac
  MOD_RES (9)..(9): Alpha-Me S5-pentenyl-alanine olefin amino acid connected by an all-carbon crosslinker comprising one double bond
  MISC_FEATURE (9)..(13): Crosslink between residues
  MOD_RES (13)..(13): Alpha-Me S5-pentenyl-alanine olefin amino acid connected by an all-carbon crosslinker comprising one double bond
  MOD_RES (16)..(16): 2-aminoisobutyric acid
  C-term NH2
IWIAQALRAIGDAFNXFYAHH

SEQ ID NO: 785 - protein, 21 aa, Artificial Sequence
  Description of Artificial Sequence: Synthetic peptide
  N-term Ac
  MOD_RES (9)..(9): Alpha-Me S5-pentenyl-alanine olefin amino acid connected by an all-carbon crosslinker comprising one double bond
  MISC_FEATURE (9)..(13): Crosslink between residues
  MOD_RES (13)..(13): Alpha-Me S5-pentenyl-alanine olefin amino acid connected by an all-carbon crosslinker comprising one double bond
  MOD_RES (16)..(16): 2-aminoisobutyric acid
  C-term NH2
RWIAQQLRAIGDAFNXYYAHH

SEQ ID NO: 786 - protein, 21 aa, Artificial Sequence
  Description of Artificial Sequence: Synthetic peptide
  N-term Ac
  MOD_RES (9)..(9): Alpha-Me S5-pentenyl-alanine olefin amino acid connected by an all-carbon crosslinker comprising one double bond
  MISC_FEATURE (9)..(13): Crosslink between residues
  MOD_RES (13)..(13): Alpha-Me S5-pentenyl-alanine olefin amino acid connected by an all-carbon crosslinker comprising one double bond
  MOD_RES (16)..(16): 2-aminoisobutyric acid
  C-term NH2
IWIAQALRAIGDAFNXYYAHH

SEQ ID NO: 787 - protein, 21 aa, Artificial Sequence
  Description of Artificial Sequence: Synthetic peptide
  N-term Ac
  MOD_RES (9)..(9): Alpha-Me S5-pentenyl-alanine olefin amino acid connected by an all-carbon crosslinker comprising one double bond
  MISC_FEATURE (9)..(13): Crosslink between residues
  MOD_RES (13)..(13): Alpha-Me S5-pentenyl-alanine olefin amino acid connected by an all-carbon crosslinker comprising one double bond
  MOD_RES (16)..(16): 2-aminoisobutyric acid
  C-term NH2
RWIAQALRAIGDAFNXYYAHH

SEQ ID NO: 788 - protein, 21 aa, Artificial Sequence
  Description of Artificial Sequence: Synthetic peptide
  N-term Ac
  MOD_RES (9)..(9): Alpha-Me S5-pentenyl-alanine olefin amino acid connected by an all-carbon crosslinker comprising one double bond
  MISC_FEATURE (9)..(13): Crosslink between residues
  MOD_RES (13)..(13): Alpha-Me S5-pentenyl-alanine olefin amino acid connected by an all-carbon crosslinker comprising one double bond
  MOD_RES (16)..(16): 2-aminoisobutyric acid
  C-term NH2
RWIAQALRAIGDALNXYYAHH

SEQ ID NO: 789 - protein, 20 aa, Artificial Sequence
  Description of Artificial Sequence: Synthetic peptide
  N-term Ac
  MOD_RES (8)..(8): Alpha-Me S5-pentenyl-alanine olefin amino acid connected by an all-carbon crosslinker comprising one double bond
  MISC_FEATURE (8)..(12): Crosslink between residues
  MOD_RES (12)..(12): Alpha-Me S5-pentenyl-alanine olefin amino acid connected by an all-carbon crosslinker comprising one double bond
  MOD_RES (15)..(15): 2-aminoisobutyric acid
  C-term NH2
RIAQQLRAIGDAFNXFYAHH

SEQ ID NO: 790 - protein, 20 aa, Artificial Sequence
  Description of Artificial Sequence: Synthetic peptide
  N-term Pr
  MOD_RES (8)..(8): Alpha-Me S5-pentenyl-alanine olefin amino acid connected by an all-carbon crosslinker comprising one double bond
  MISC_FEATURE (8)..(12): Crosslink between residues
  MOD_RES (12)..(12): Alpha-Me S5-pentenyl-alanine olefin amino acid connected by an all-carbon crosslinker comprising one double bond
  MOD_RES (15)..(15): 2-aminoisobutyric acid
  C-term NH2
WIAQQLRAIGDAFNXYYAHH

SEQ ID NO: 791 - protein, 20 aa, Artificial Sequence
  Description of Artificial Sequence: Synthetic peptide
  N-term Pr
  MOD_RES (8)..(8): Alpha-Me S5-pentenyl-alanine olefin amino acid connected by an all-carbon crosslinker comprising one double bond
  MISC_FEATURE (8)..(12): Crosslink between residues
  MOD_RES (12)..(12): Alpha-Me S5-pentenyl-alanine olefin amino acid connected by an all-carbon crosslinker comprising one double bond
  MOD_RES (15)..(15): 2-aminoisobutyric acid
  C-term NH2
RIAQQLRAIGDAFNXYYAHH

SEQ ID NO: 792 - protein, 20 aa, Artificial Sequence
  Description of Artificial Sequence: Synthetic peptide
  N-term Pr
  MOD_RES (8)..(8): Alpha-Me S5-pentenyl-alanine olefin amino acid connected by an all-carbon crosslinker comprising one double bond
  MISC_FEATURE (8)..(12): Crosslink between residues
  MOD_RES (12)..(12): Alpha-Me S5-pentenyl-alanine olefin amino acid connected by an all-carbon crosslinker comprising one double bond
  MOD_RES (15)..(15): 2-aminoisobutyric acid
  C-term NH2
NIAQQLRAIGDAFNXFYAHH

SEQ ID NO: 793 - protein, 20 aa, Artificial Sequence
  Description of Artificial Sequence: Synthetic peptide
  N-term Pr
  MOD_RES (8)..(8): Alpha-Me S5-pentenyl-alanine olefin amino acid connected by an all-carbon crosslinker comprising one double bond
  MISC_FEATURE (8)..(12): Crosslink between residues
  MOD_RES (12)..(12): Alpha-Me S5-pentenyl-alanine olefin amino acid connected by an all-carbon crosslinker comprising one double bond
  MOD_RES (15)..(15): 2-aminoisobutyric acid
  C-term NH2
SIAQQLRAIGDAFNXFYAHH

SEQ ID NO: 794 - protein, 20 aa, Artificial Sequence
  Description of Artificial Sequence: Synthetic peptide
  N-term Pr
  MOD_RES (8)..(8): Alpha-Me S5-pentenyl-alanine olefin amino acid connected by an all-carbon crosslinker comprising one double bond
  MISC_FEATURE (8)..(12): Crosslink between residues
  MOD_RES (12)..(12): Alpha-Me S5-pentenyl-alanine olefin amino acid connected by an all-carbon crosslinker comprising one double bond
  MOD_RES (15)..(15): 2-aminoisobutyric acid
  C-term NH2
NIAQQLRAIGDAFNXYYARR

SEQ ID NO: 795 - protein, 20 aa, Artificial Sequence
  Description of Artificial Sequence: Synthetic peptide
  N-term Pr
  MOD_RES (8)..(8): Alpha-Me S5-pentenyl-alanine olefin amino acid connected by an all-carbon crosslinker comprising one double bond
  MISC_FEATURE (8)..(12): Crosslink between residues
  MOD_RES (12)..(12): Alpha-Me S5-pentenyl-alanine olefin amino acid connected by an all-carbon crosslinker comprising one double bond
  MOD_RES (15)..(15): 2-aminoisobutyric acid
  C-term NH2
SIAQQLRAIGDAFNXYYARR

SEQ ID NO: 796 - protein, 21 aa, Artificial Sequence
  Description of Artificial Sequence: Synthetic peptide
  N-term Ac
  MOD_RES (5)..(5): Alpha-Me R5-pentenyl-alanine olefin amino acid connected by an all-carbon crosslinker comprising one double bond
  MISC_FEATURE (5)..(9): Crosslink between residues
  MOD_RES (9)..(9): Two pentenyl-alanine olefin side chains, each of which is crosslinked to another amino acid as indicated
  MISC_FEATURE (9)..(13): Crosslink between residues
  MOD_RES (13)..(13): Alpha-Me S5-pentenyl-alanine olefin amino acid connected by an all-carbon crosslinker comprising one double bond
  C-term NH2
IWIAAQLRAIGDAFNAYYARR

SEQ ID NO: 797 - protein, 21 aa, Artificial Sequence
  Description of Artificial Sequence: Synthetic peptide
  N-term Ac
  MOD_RES (5)..(5): Alpha-Me S5-pentenyl-alanine olefin amino acid connected by an all-carbon crosslinker comprising one double bond
  MISC_FEATURE (5)..(9): Crosslink between residues
  MOD_RES (9)..(9): Two pentenyl-alanine olefin side chains, each of which is crosslinked to another amino acid as indicated
  MISC_FEATURE (9)..(13): Crosslink between residues
  MOD_RES (13)..(13): Alpha-Me R5-pentenyl-alanine olefin amino acid connected by an all-carbon crosslinker comprising one double bond
  C-term NH2
IWIAAALDAIGDAFNAYYARR

SEQ ID NO: 798 - protein, 21 aa, Artificial Sequence
  Description of Artificial Sequence: Synthetic peptide
  N-term Ac
  MOD_RES (9)..(9): Alpha-Me S5-pentenyl-alanine olefin amino acid connected by an all-carbon crosslinker comprising one double bond
  MISC_FEATURE (9)..(13): Crosslink between residues
  MOD_RES (13)..(13): Alpha-Me S5-pentenyl-alanine olefin amino acid connected by an all-carbon crosslinker comprising one double bond
  MOD_RES (16)..(16): 2-aminoisobutyric acid
  C-term NH2
RWIAQALDAIGDAFNXFYAHH

SEQ ID NO: 799 - protein, 21 aa, Artificial Sequence
  Description of Artificial Sequence: Synthetic peptide
  N-term Ac
  MOD_RES (9)..(9): Alpha-Me S5-pentenyl-alanine olefin amino acid connected by an all-carbon crosslinker comprising one double bond
  MISC_FEATURE (9)..(13): Crosslink between residues
  MOD_RES (13)..(13): Alpha-Me S5-pentenyl-alanine olefin amino acid connected by an all-carbon crosslinker comprising one double bond
  MOD_RES (16)..(16): 2-aminoisobutyric acid
  C-term NH2
RWIAQQLRAIGDALNXFYAHH

SEQ ID NO: 800 - protein, 21 aa, Artificial Sequence
  Description of Artificial Sequence: Synthetic peptide
  N-term Ac
  MOD_RES (9)..(9): Alpha-Me S5-pentenyl-alanine olefin amino acid connected by an all-carbon crosslinker comprising one double bond
  MISC_FEATURE (9)..(13): Crosslink between residues
  MOD_RES (13)..(13): Alpha-Me S5-pentenyl-alanine olefin amino acid connected by an all-carbon crosslinker comprising one double bond
  MOD_RES (16)..(16): 2-aminoisobutyric acid
  C-term NH2
IWIAQQLRAIGDALNXFYAHH

SEQ ID NO: 801 - protein, 21 aa, Artificial Sequence
  Description of Artificial Sequence: Synthetic peptide
  N-term Ac
  MOD_RES (9)..(9): Alpha-Me S5-pentenyl-alanine olefin amino acid connected by an all-carbon crosslinker comprising one double bond
  MISC_FEATURE (9)..(13): Crosslink between residues
  MOD_RES (13)..(13): Alpha-Me S5-pentenyl-alanine olefin amino acid connected by an all-carbon crosslinker comprising one double bond
  MOD_RES (16)..(16): 2-aminoisobutyric acid
  C-term NH2
RAIAQQLRAIGDALNXFYAHH

SEQ ID NO: 802 - protein, 21 aa, Artificial Sequence
  Description of Artificial Sequence: Synthetic peptide
  N-term Ac
  MOD_RES (9)..(9): Alpha-Me S5-pentenyl-alanine olefin amino acid connected by an all-carbon crosslinker comprising one double bond
  MISC_FEATURE (9)..(13): Crosslink between residues
  MOD_RES (13)..(13): Alpha-Me S5-pentenyl-alanine olefin amino acid connected by an all-carbon crosslinker comprising one double bond
  MOD_RES (16)..(16): 2-aminoisobutyric acid
  C-term NH2
IRIAQQLRAIGDALNXFYAHH

SEQ ID NO: 803 - protein, 21 aa, Artificial Sequence
  Description of Artificial Sequence: Synthetic peptide
  N-term Ac
  MOD_RES (9)..(9): Alpha-Me S5-pentenyl-alanine olefin amino acid connected by an all-carbon crosslinker comprising one double bond
  MISC_FEATURE (9)..(13): Crosslink between residues
  MOD_RES (13)..(13): Alpha-Me S5-pentenyl-alanine olefin amino acid connected by an all-carbon crosslinker comprising one double bond
  MOD_RES (16)..(16): 2-aminoisobutyric acid
  C-term NH2
RAIAQQLRAIGDAFNXFYAHH

SEQ ID NO: 804 - protein, 21 aa, Artificial Sequence
  Description of Artificial Sequence: Synthetic peptide
  N-term Ac
  MOD_RES (9)..(9): Alpha-Me S5-pentenyl-alanine olefin amino acid connected by an all-carbon crosslinker comprising one double bond
  MISC_FEATURE (9)..(13): Crosslink between residues
  MOD_RES (13)..(13): Alpha-Me S5-pentenyl-alanine olefin amino acid connected by an all-carbon crosslinker comprising one double bond
  MOD_RES (16)..(16): 2-aminoisobutyric acid
  C-term NH2
IRIAQQLRAIGDAFNXFYAHH

SEQ ID NO: 805 - protein, 21 aa, Artificial Sequence
  Description of Artificial Sequence: Synthetic peptide
  N-term Ac
  MOD_RES (9)..(9): Alpha-Me S5-pentenyl-alanine olefin amino acid connected by an all-carbon crosslinker comprising one double bond
  MISC_FEATURE (9)..(13): Crosslink between residues
  MOD_RES (13)..(13): Alpha-Me S5-pentenyl-alanine olefin amino acid connected by an all-carbon crosslinker comprising one double bond
  MOD_RES (16)..(16): 2-aminoisobutyric acid
  C-term NH2
RWIAQALRAIGAAFNXFYAHH

SEQ ID NO: 806 - protein, 21 aa, Artificial Sequence
  Description of Artificial Sequence: Synthetic peptide
  N-term Ac
  MOD_RES (9)..(9): Alpha-Me S5-pentenyl-alanine olefin amino acid connected by an all-carbon crosslinker comprising one double bond
  MISC_FEATURE (9)..(13): Crosslink between residues
  MOD_RES (13)..(13): Alpha-Me S5-pentenyl-alanine olefin amino acid connected by an all-carbon crosslinker comprising one double bond
  C-term NH2
RWIAQQLRAIGAAFNAFYAHH

SEQ ID NO: 807 - protein, 20 aa, Artificial Sequence
  Description of Artificial Sequence: Synthetic peptide
  N-term Pr
  MOD_RES (8)..(8): Alpha-Me S5-pentenyl-alanine olefin amino acid connected by an all-carbon crosslinker comprising one double bond
  MISC_FEATURE (8)..(12): Crosslink between residues
  MOD_RES (12)..(12): Alpha-Me S5-pentenyl-alanine olefin amino acid connected by an all-carbon crosslinker comprising one double bond
  MOD_RES (15)..(15): 2-aminoisobutyric acid
  C-term NH2
RIAQQLRAIGDAFNXFYAHH

SEQ ID NO: 808 - protein, 20 aa, Artificial Sequence
  Description of Artificial Sequence: Synthetic peptide
  N-term Pr
  MOD_RES (8)..(8): Alpha-Me S5-pentenyl-alanine olefin amino acid connected by an all-carbon crosslinker comprising one double bond
  MISC_FEATURE (8)..(12): Crosslink between residues
  MOD_RES (12)..(12): Alpha-Me S5-pentenyl-alanine olefin amino acid connected by an all-carbon crosslinker comprising one double bond
  MOD_RES (15)..(15): 2-aminoisobutyric acid
  C-term NH2
WIAQQLRAIGDAFNXFYAHH

SEQ ID NO: 809 - protein, 21 aa, Artificial Sequence
  Description of Artificial Sequence: Synthetic peptide
  N-term Ac
  MOD_RES (9)..(9): Alpha-Me S5-pentenyl-alanine olefin amino acid connected by an all-carbon crosslinker comprising one double bond
  MISC_FEATURE (9)..(13): Crosslink between residues
  MOD_RES (13)..(13): Alpha-Me S5-pentenyl-alanine olefin amino acid connected by an all-carbon crosslinker comprising one double bond
  MOD_RES (16)..(16): 2-aminoisobutyric acid
  C-term NH2
RWIAQALRAIGDAINXFYAHH

SEQ ID NO: 810 - protein, 21 aa, Artificial Sequence
  Description of Artificial Sequence: Synthetic peptide
  N-term Ac
  MOD_RES (9)..(9): Alpha-Me S5-pentenyl-alanine olefin amino acid connected by an all-carbon crosslinker comprising one double bond
  MISC_FEATURE (9)..(13): Crosslink between residues
  MOD_RES (13)..(13): Alpha-Me S5-pentenyl-alanine olefin amino acid connected by an all-carbon crosslinker comprising one double bond
  MOD_RES (14)..(14): Cyclohexyl-Gly
  MOD_RES (16)..(16): 2-aminoisobutyric acid
  C-term NH2
RWIAQALRAIGDAGNXFYAHH

SEQ ID NO: 811 - protein, 21 aa, Artificial Sequence
  Description of Artificial Sequence: Synthetic peptide
  N-term Ac
  MOD_RES (9)..(9): Alpha-Me S5-pentenyl-alanine olefin amino acid connected by an all-carbon crosslinker comprising one double bond
  MISC_FEATURE (9)..(13): Crosslink between residues
  MOD_RES (13)..(13): Alpha-Me S5-pentenyl-alanine olefin amino acid connected by an all-carbon crosslinker comprising one double bond
  MOD_RES (16)..(16): 2-aminoisobutyric acid
  C-term NH2
IWIAQQLRAIGDAVNXFYAHH

SEQ ID NO: 812 - protein, 21 aa, Artificial Sequence
  Description of Artificial Sequence: Synthetic peptide
  N-term Ac
  MOD_RES (9)..(9): Alpha-Me S5-pentenyl-alanine olefin amino acid connected by an all-carbon crosslinker comprising one double bond
  MISC_FEATURE (9)..(13): Crosslink between residues
  MOD_RES (13)..(13): Alpha-Me S5-pentenyl-alanine olefin amino acid connected by an all-carbon crosslinker comprising one double bond
  MOD_RES (16)..(16): 2-aminoisobutyric acid
  C-term NH2
IWIAQQLRAIGDAINXFYAHH

SEQ ID NO: 813 - protein, 21 aa, Artificial Sequence
  Description of Artificial Sequence: Synthetic peptide
  N-term Ac
  MOD_RES (9)..(9): Alpha-Me S5-pentenyl-alanine olefin amino acid connected by an all-carbon crosslinker comprising one double bond
  MISC_FEATURE (9)..(13): Crosslink between residues
  MOD_RES (13)..(13): Alpha-Me S5-pentenyl-alanine olefin amino acid connected by an all-carbon crosslinker comprising one double bond
  MOD_RES (16)..(16): 2-aminoisobutyric acid
  C-term NH2
RWIAQQLRAIGDAVNXFYAHH

SEQ ID NO: 814 - protein, 21 aa, Artificial Sequence
  Description of Artificial Sequence: Synthetic peptide
  N-term Ac
  MOD_RES (9)..(9): Alpha-Me S5-pentenyl-alanine olefin amino acid connected by an all-carbon crosslinker comprising one double bond
  MISC_FEATURE (9)..(13): Crosslink between residues
  MOD_RES (13)..(13): Alpha-Me S5-pentenyl-alanine olefin amino acid connected by an all-carbon crosslinker comprising one double bond
  MOD_RES (16)..(16): 2-aminoisobutyric acid
  C-term NH2
RWIAQQLRAIGDAINXFYAHH

SEQ ID NO: 815 - protein, 20 aa, Artificial Sequence
  Description of Artificial Sequence: Synthetic peptide
  N-term Pr
  MOD_RES (8)..(8): Alpha-Me S5-pentenyl-alanine olefin amino acid connected by an all-carbon crosslinker comprising one double bond
  MISC_FEATURE (8)..(12): Crosslink between residues
  MOD_RES (12)..(12): Alpha-Me S5-pentenyl-alanine olefin amino acid connected by an all-carbon crosslinker comprising one double bond
  MOD_RES (15)..(15): 2-aminoisobutyric acid
  C-term NH2
WIAQQLRAIGDAVNXFYAHH

SEQ ID NO: 816 - protein, 21 aa, Artificial Sequence
  Description of Artificial Sequence: Synthetic peptide
  N-term Ac
  MOD_RES (9)..(9): Alpha-Me S5-pentenyl-alanine olefin amino acid connected by an all-carbon crosslinker comprising one double bond
  MISC_FEATURE (9)..(13): Crosslink between residues
  MOD_RES (13)..(13): Alpha-Me S5-pentenyl-alanine olefin amino acid connected by an all-carbon crosslinker comprising one double bond
  MOD_RES (16)..(16): 2-aminoisobutyric acid
  C-term NH2
RWIAQAFRAIGDAVNXFYAHH

SEQ ID NO: 817 - protein, 21 aa, Artificial Sequence
  Description of Artificial Sequence: Synthetic peptide
  N-term Ac
  MOD_RES (7)..(7): Norleucine
  MOD_RES (9)..(9): Alpha-Me S5-pentenyl-alanine olefin amino acid connected by an all-carbon crosslinker comprising one double bond
  MISC_FEATURE (9)..(13): Crosslink between residues
  MOD_RES (13)..(13): Alpha-Me S5-pentenyl-alanine olefin amino acid connected by an all-carbon crosslinker comprising one double bond
  MOD_RES (16)..(16): 2-aminoisobutyric acid
  C-term NH2
RWIAQALRAIGDAVNXFYAHH

SEQ ID NO: 818 - protein, 21 aa, Artificial Sequence
  Description of Artificial Sequence: Synthetic peptide
  N-term Ac
  MOD_RES (7)..(7): Cyclohexyl-Gly
  MOD_RES (9)..(9): Alpha-Me S5-pentenyl-alanine olefin amino acid connected by an all-carbon crosslinker comprising one double bond
  MISC_FEATURE (9)..(13): Crosslink between residues
  MOD_RES (13)..(13): Alpha-Me S5-pentenyl-alanine olefin amino acid connected by an all-carbon crosslinker comprising one double bond
  MOD_RES (16)..(16): 2-aminoisobutyric acid
  C-term NH2
RWIAQAGRAIGDAVNXFYAHH

SEQ ID NO: 819 - protein, 21 aa, Artificial Sequence
  Description of Artificial Sequence: Synthetic peptide
  N-term Ac
  MOD_RES (9)..(9): Alpha-Me S5-pentenyl-alanine olefin amino acid connected by an all-carbon crosslinker comprising one double bond
  MISC_FEATURE (9)..(13): Crosslink between residues
  MOD_RES (13)..(13): Alpha-Me S5-pentenyl-alanine olefin amino acid connected by an all-carbon crosslinker comprising one double bond
  MOD_RES (19)..(19): 2-aminoisobutyric acid
  C-term NH2
RWIAQALRAIGDALNAFYXHH

SEQ ID NO: 820 - protein, 21 aa, Artificial Sequence
  Description of Artificial Sequence: Synthetic peptide
  N-term Ac
  MOD_RES (9)..(9): Alpha-Me S5-pentenyl-alanine olefin amino acid connected by an all-carbon crosslinker comprising one double bond
  MISC_FEATURE (9)..(13): Crosslink between residues
  MOD_RES (13)..(13): Alpha-Me S5-pentenyl-alanine olefin amino acid connected by an all-carbon crosslinker comprising one double bond
  MOD_RES (19)..(19): 2-aminoisobutyric acid
  C-term NH2
RWIAQALRAIGDAVNAFYXHH

SEQ ID NO: 821 - protein, 21 aa, Artificial Sequence
  Description of Artificial Sequence: Synthetic peptide
  N-term Ac
  MOD_RES (9)..(9): Alpha-Me S5-pentenyl-alanine olefin amino acid connected by an all-carbon crosslinker comprising one double bond
  MISC_FEATURE (9)..(13): Crosslink between residues
  MOD_RES (13)..(13): Alpha-Me S5-pentenyl-alanine olefin amino acid connected by an all-carbon crosslinker comprising one double bond
  MOD_RES (16)..(16): 2-aminoisobutyric acid
  C-term NH2
RWIAQALDAIGDAFNXYYAHH

SEQ ID NO: 822 - protein, 21 aa, Artificial Sequence
  Description of Artificial Sequence: Synthetic peptide
  N-term Ac
  MOD_RES (5)..(5): Alpha-Me R5-pentenyl-alanine olefin amino acid connected by an all-carbon crosslinker comprising one double bond
  MISC_FEATURE (5)..(9): Crosslink between residues
  MOD_RES (9)..(9): Two pentenyl-alanine olefin side chains, each of which is crosslinked to another amino acid as indicated
  MISC_FEATURE (9)..(13): Crosslink between residues
  MOD_RES (13)..(13): Alpha-Me S5-pentenyl-alanine olefin amino acid connected by an all-carbon crosslinker comprising one double bond
  C-term NH2
RWIAAALRAIGDAFNAYYARR

SEQ ID NO: 823 - protein, 21 aa, Artificial Sequence
  Description of Artificial Sequence: Synthetic peptide
  N-term Ac
  MOD_RES (5)..(5): Alpha-Me R5-pentenyl-alanine olefin amino acid connected by an all-carbon crosslinker comprising one double bond
  MISC_FEATURE (5)..(9): Crosslink between residues
  MOD_RES (9)..(9): Two pentenyl-alanine olefin side chains, each of which is crosslinked to another amino acid as indicated
  MISC_FEATURE (9)..(13): Crosslink between residues
  MOD_RES (13)..(13): Alpha-Me S5-pentenyl-alanine olefin amino acid connected by an all-carbon crosslinker comprising one double bond
  C-term NH2
IWIAAALDAIGDAFNAYYARR

SEQ ID NO: 824 - protein, 21 aa, Artificial Sequence
  Description of Artificial Sequence: Synthetic peptide
  N-term Ac
  MOD_RES (5)..(5): Alpha-Me R5-pentenyl-alanine olefin amino acid connected by an all-carbon crosslinker comprising one double bond
  MISC_FEATURE (5)..(9): Crosslink between residues
  MOD_RES (9)..(9): Two pentenyl-alanine olefin side chains, each of which is crosslinked to another amino acid as indicated
  MISC_FEATURE (9)..(13): Crosslink between residues
  MOD_RES (13)..(13): Alpha-Me S5-pentenyl-alanine olefin amino acid connected by an all-carbon crosslinker comprising one double bond
  MOD_RES (19)..(19): 2-aminoisobutyric acid
  C-term NH2
IWIAAALRAIGDAFNAYYXRR

SEQ ID NO: 825 - protein, 21 aa, Artificial Sequence
  Description of Artificial Sequence: Synthetic peptide
  N-term Ac
  MOD_RES (5)..(5): Alpha-Me R5-pentenyl-alanine olefin amino acid connected by an all-carbon crosslinker comprising one double bond
  MISC_FEATURE (5)..(9): Crosslink between residues
  MOD_RES (9)..(9): Two pentenyl-alanine olefin side chains, each of which is crosslinked to another amino acid as indicated
  MISC_FEATURE (9)..(13): Crosslink between residues
  MOD_RES (13)..(13): Alpha-Me S5-pentenyl-alanine olefin amino acid connected by an all-carbon crosslinker comprising one double bond
  C-term NH2
IWIAAALRAIGDAVNAYYARR

SEQ ID NO: 826 - protein, 21 aa, Artificial Sequence
  Description of Artificial Sequence: Synthetic peptide
  N-term Ac
  MOD_RES (9)..(9): Alpha-Me S5-pentenyl-alanine olefin amino acid connected by an all-carbon crosslinker comprising one double bond
  MISC_FEATURE (9)..(13): Crosslink between residues
  MOD_RES (13)..(13): Alpha-Me S5-pentenyl-alanine olefin amino acid connected by an all-carbon crosslinker comprising one double bond
  MOD_RES (16)..(16): 2-aminoisobutyric acid
  C-term NH2
IRIAQALRAIGDAFNXFYAHH

SEQ ID NO: 827 - protein, 21 aa, Artificial Sequence
  Description of Artificial Sequence: Synthetic peptide
  N-term Ac
  MOD_RES (9)..(9): Alpha-Me S5-pentenyl-alanine olefin amino acid connected by an all-carbon crosslinker comprising one double bond
  MISC_FEATURE (9)..(13): Crosslink between residues
  MOD_RES (13)..(13): Alpha-Me S5-pentenyl-alanine olefin amino acid connected by an all-carbon crosslinker comprising one double bond
  MOD_RES (16)..(16): 2-aminoisobutyric acid
  C-term NH2
INIAQALRAIGDAFNXFYAHH

SEQ ID NO: 828 - protein, 21 aa, Artificial Sequence
  Description of Artificial Sequence: Synthetic peptide
  N-term Ac
  MOD_RES (9)..(9): Alpha-Me S5-pentenyl-alanine olefin amino acid connected by an all-carbon crosslinker comprising one double bond
  MISC_FEATURE (9)..(13): Crosslink between residues
  MOD_RES (13)..(13): Alpha-Me S5-pentenyl-alanine olefin amino acid connected by an all-carbon crosslinker comprising one double bond
  MOD_RES (16)..(16): 2-aminoisobutyric acid
  C-term NH2
IFIAQALRAIGDAFNXFYAHH

SEQ ID NO: 829 - protein, 21 aa, Artificial Sequence
  Description of Artificial Sequence: Synthetic peptide
  N-term Ac
  MOD_RES (9)..(9): Alpha-Me S5-pentenyl-alanine olefin amino acid connected by an all-carbon crosslinker comprising one double bond
  MISC_FEATURE (9)..(13): Crosslink between residues
  MOD_RES (13)..(13): Alpha-Me S5-pentenyl-alanine olefin amino acid connected by an all-carbon crosslinker comprising one double bond
  MOD_RES (16)..(16): 2-aminoisobutyric acid
  C-term NH2
ISIAQALRAIGDAFNXFYAHH

SEQ ID NO: 830 - protein, 21 aa, Artificial Sequence
  Description of Artificial Sequence: Synthetic peptide
  N-term Ac
  MOD_RES (2)..(2): 2-aminoisobutyric acid
  MOD_RES (9)..(9): Alpha-Me S5-pentenyl-alanine olefin amino acid connected by an all-carbon crosslinker comprising one double bond
  MISC_FEATURE (9)..(13): Crosslink between residues
  MOD_RES (13)..(13): Alpha-Me S5-pentenyl-alanine olefin amino acid connected by an all-carbon crosslinker comprising one double bond
  MOD_RES (16)..(16): 2-aminoisobutyric acid
  C-term NH2
IXIAQALRAIGDAFNXFYAHH

SEQ ID NO: 831 - protein, 21 aa, Artificial Sequence
  Description of Artificial Sequence: Synthetic peptide
  N-term Ac
  MOD_RES (3)..(3): Norleucine
  MOD_RES (9)..(9): Alpha-Me S5-pentenyl-alanine olefin amino acid connected by an all-carbon crosslinker comprising one double bond
  MISC_FEATURE (9)..(13): Crosslink between residues
  MOD_RES (13)..(13): Alpha-Me S5-pentenyl-alanine olefin amino acid connected by an all-carbon crosslinker comprising one double bond
  MOD_RES (16)..(16): 2-aminoisobutyric acid
  C-term NH2
IWLAQALRAIGDAFNXFYAHH

SEQ ID NO: 832 - protein, 21 aa, Artificial Sequence
  Description of Artificial Sequence: Synthetic peptide
  N-term Ac
  MOD_RES (7)..(7): Norleucine
  MOD_RES (9)..(9): Alpha-Me S5-pentenyl-alanine olefin amino acid connected by an all-carbon crosslinker comprising one double bond
  MISC_FEATURE (9)..(13): Crosslink between residues
  MOD_RES (13)..(13): Alpha-Me S5-pentenyl-alanine olefin amino acid connected by an all-carbon crosslinker comprising one double bond
  MOD_RES (16)..(16): 2-aminoisobutyric acid
  C-term NH2
IWIAQALRAIGDAFNXFYAHH

SEQ ID NO: 833 - protein, 21 aa, Artificial Sequence
  Description of Artificial Sequence: Synthetic peptide
  N-term Ac
  MOD_RES (4)..(4): 2-aminoisobutyric acid
  MOD_RES (9)..(9): Alpha-Me S5-pentenyl-alanine olefin amino acid connected by an all-carbon crosslinker comprising one double bond
  MISC_FEATURE (9)..(13): Crosslink between residues
  MOD_RES (13)..(13): Alpha-Me S5-pentenyl-alanine olefin amino acid connected by an all-carbon crosslinker comprising one double bond
  MOD_RES (16)..(16): 2-aminoisobutyric acid
  C-term NH2
IWIXQALRAIGDAFNXFYAHH

SEQ ID NO: 834 - protein, 19 aa, Artificial Sequence
  Description of Artificial Sequence: Synthetic peptide
  N-term Pr
  MOD_RES (7)..(7): Alpha-Me S5-pentenyl-alanine olefin amino acid connected by an all-carbon crosslinker comprising one double bond
  MISC_FEATURE (7)..(11): Crosslink between residues
  MOD_RES (11)..(11): Alpha-Me S5-pentenyl-alanine olefin amino acid connected by an all-carbon crosslinker comprising one double bond
  MOD_RES (14)..(14): 2-aminoisobutyric acid
  C-term NH2
IAQALRAIGDAFNXFYAHH

SEQ ID NO: 835 - protein, 21 aa, Artificial Sequence
  Description of Artificial Sequence: Synthetic peptide
  N-term Ac
  MOD_RES (6)..(6): 2-aminoisobutyric acid
  MOD_RES (9)..(9): Alpha-Me S5-pentenyl-alanine olefin amino acid connected by an all-carbon crosslinker comprising one double bond
  MISC_FEATURE (9)..(13): Crosslink between residues
  MOD_RES (13)..(13): Alpha-Me S5-pentenyl-alanine olefin amino acid connected by an all-carbon crosslinker comprising one double bond
  MOD_RES (16)..(16): 2-aminoisobutyric acid
  C-term NH2
IWIAQXLRAIGDAFNXFYAHH

SEQ ID NO: 836 - protein, 21 aa, Artificial Sequence
  Description of Artificial Sequence: Synthetic peptide
  N-term Ac
  MOD_RES (9)..(9): Alpha-Me S5-pentenyl-alanine olefin amino acid connected by an all-carbon crosslinker comprising one double bond
  MISC_FEATURE (9)..(13): Crosslink between residues
  MOD_RES (13)..(13): Alpha-Me S5-pentenyl-alanine olefin amino acid connected by an all-carbon crosslinker comprising one double bond
  MOD_RES (16)..(16): 2-aminoisobutyric acid
  C-term NH2
IWIAQLLRAIGDAFNXFYAHH

SEQ ID NO: 837 - protein, 21 aa, Artificial Sequence
  Description of Artificial Sequence: Synthetic peptide
  N-term Ac
  MOD_RES (9)..(9): Alpha-Me S5-pentenyl-alanine olefin amino acid connected by an all-carbon crosslinker comprising one double bond
  MISC_FEATURE (9)..(13): Crosslink between residues
  MOD_RES (13)..(13): Alpha-Me S5-pentenyl-alanine olefin amino acid connected by an all-carbon crosslinker comprising one double bond
  MOD_RES (16)..(16): 2-aminoisobutyric acid
  C-term NH2
IWIAQFLRAIGDAFNXFYAHH

SEQ ID NO: 838 - protein, 19 aa, Artificial Sequence
  Description of Artificial Sequence: Synthetic peptide
  N-term Ac
  MOD_RES (9)..(9): Alpha-Me S5-pentenyl-alanine olefin amino acid connected by an all-carbon crosslinker comprising one double bond
  MISC_FEATURE (9)..(13): Crosslink between residues
  MOD_RES (13)..(13): Alpha-Me S5-pentenyl-alanine olefin amino acid connected by an all-carbon crosslinker comprising one double bond
  MOD_RES (16)..(16): 2-aminoisobutyric acid
  C-term NH2
IAIAAFLRAIGDAFNXFYA

SEQ ID NO: 839 - protein, 21 aa, Artificial Sequence
  Description of Artificial Sequence: Synthetic peptide
  N-term Ac
  MOD_RES (9)..(9): Alpha-Me S5-pentenyl-alanine olefin amino acid connected by an all-carbon crosslinker comprising one double bond
  MISC_FEATURE (9)..(13): Crosslink between residues
  MOD_RES (13)..(13): Alpha-Me S5-pentenyl-alanine olefin amino acid connected by an all-carbon crosslinker comprising one double bond
  MOD_RES (16)..(16): 2-aminoisobutyric acid
  MOD_RES (19)..(19): 2-aminoisobutyric acid
  C-term NH2
IWIAQALRAIGDAFNXYYXHH

SEQ ID NO: 840 - protein, 21 aa, Artificial Sequence
  Description of Artificial Sequence: Synthetic peptide
  N-term Ac
  MOD_RES (9)..(9): Alpha-Me S5-pentenyl-alanine olefin amino acid connected by an all-carbon crosslinker comprising one double bond
  MISC_FEATURE (9)..(13): Crosslink between residues
  MOD_RES (13)..(13): Alpha-Me S5-pentenyl-alanine olefin amino acid connected by an all-carbon crosslinker comprising one double bond
  MOD_RES (16)..(16): 2-aminoisobutyric acid
  C-term NH2
IWIAQALRAIGDAFAXFYAHH

SEQ ID NO: 841 - protein, 21 aa, Artificial Sequence
  Description of Artificial Sequence: Synthetic peptide
  N-term Ac
  MOD_RES (9)..(9): Alpha-Me R8-octenyl-alanine olefin amino acid connected by an all-carbon crosslinker comprising one double bond
  MISC_FEATURE (9)..(16): Crosslink between residues
  MOD_RES (13)..(13): 2-aminoisobutyric acid
  MOD_RES (16)..(16): Alpha-Me S5-pentenyl-alanine olefin amino acid connected by an all-carbon crosslinker comprising one double bond
  C-term NH2
RWIAQALRAIGDXFNAFYAHH

SEQ ID NO: 842 - protein, 21 aa, Artificial Sequence
  Description of Artificial Sequence: Synthetic peptide
  N-term Ac
  MOD_RES (9)..(9): Alpha-Me R8-octenyl-alanine olefin amino acid connected by an all-carbon crosslinker comprising one double bond
  MISC_FEATURE (9)..(16): Crosslink between residues
  MOD_RES (16)..(16): Alpha-Me S5-pentenyl-alanine olefin amino acid connected by an all-carbon crosslinker comprising one double bond
  C-term NH2
RWIAQALRAIGDAFNAFYAHH

SEQ ID NO: 843 - protein, 21 aa, Artificial Sequence
  Description of Artificial Sequence: Synthetic peptide
  N-term Ac
  MOD_RES (5)..(5): Alpha-Me R8-octenyl-alanine olefin amino acid connected by an all-carbon crosslinker comprising one double bond
  MISC_FEATURE (5)..(12): Crosslink between residues
  MOD_RES (9)..(9): 2-aminoisobutyric acid
  MOD_RES (12)..(12): Alpha-Me S5-pentenyl-alanine olefin amino acid connected by an all-carbon crosslinker comprising one double bond
  MOD_RES (16)..(16): 2-aminoisobutyric acid
  C-term NH2
RWIAAALRXIGAAFNXYYAHH

SEQ ID NO: 844 - protein, 21 aa, Artificial Sequence
  Description of Artificial Sequence: Synthetic peptide
  N-term Ac
  MOD_RES (5)..(5): Alpha-Me R8-octenyl-alanine olefin amino acid connected by an all-carbon crosslinker comprising one double bond
  MISC_FEATURE (5)..(12): Crosslink between residues
  MOD_RES (12)..(12): Alpha-Me S5-pentenyl-alanine olefin amino acid connected by an all-carbon crosslinker comprising one double bond
  MOD_RES (16)..(16): 2-aminoisobutyric acid
  C-term NH2
RWIAAALRAIGAAFNXYYAHH

SEQ ID NO: 845 - protein, 21 aa, Artificial Sequence
  Description of Artificial Sequence: Synthetic peptide
  N-term Ac
  MOD_RES (9)..(9): Alpha-Me S5-pentenyl-alanine olefin amino acid connected by an all-carbon crosslinker comprising one double bond
  MISC_FEATURE (9)..(13): Crosslink between residues
  MOD_RES (13)..(13): Alpha-Me S5-pentenyl-alanine olefin amino acid connected by an all-carbon crosslinker comprising one double bond
  MOD_RES (14)..(14): Cyclohexyl-Ala
  MOD_RES (16)..(16): 2-aminoisobutyric acid
  C-term NH2
IWIAQALRAIGDAANXFYAHH

SEQ ID NO: 846 - protein, 22 aa, Artificial Sequence
  Description of Artificial Sequence: Synthetic peptide
  N-term 5-FAM
  MOD_RES (1)..(1): Beta-Ala
  MOD_RES (10)..(10): Alpha-Me S5-pentenyl-alanine olefin amino acid connected by an all-carbon crosslinker comprising one double bond
  MISC_FEATURE (10)..(14): Crosslink between residues
  MOD_RES (14)..(14): Alpha-Me S5-pentenyl-alanine olefin amino acid connected by an all-carbon crosslinker comprising one double bond
  MOD_RES (17)..(17): 2-aminoisobutyric acid
  C-term NH2
AIWIAQALRAIGDAFNXFYAHH

SEQ ID NO: 847 - protein, 22 aa, Artificial Sequence
  Description of Artificial Sequence: Synthetic peptide
  N-term 5-FAM
  MOD_RES (1)..(1): Beta-Ala
  MOD_RES (10)..(10): Alpha-Me S5-pentenyl-alanine olefin amino acid connected by an all-carbon crosslinker comprising one double bond
  MISC_FEATURE (10)..(14): Crosslink between residues
  MOD_RES (14)..(14): Alpha-Me S5-pentenyl-alanine olefin amino acid connected by an all-carbon crosslinker comprising one double bond
  MOD_RES (17)..(17): 2-aminoisobutyric acid
  C-term NH2
ARWIAQALRAIGDALNXFYAHH

SEQ ID NO: 848 - protein, 21 aa, Artificial Sequence
  Description of Artificial Sequence: Synthetic peptide
  N-term Ac
  MOD_RES (9)..(9): Alpha-Me S5-pentenyl-alanine olefin amino acid connected by an all-carbon crosslinker comprising one double bond
  MISC_FEATURE (9)..(13): Crosslink between residues
  MOD_RES (11)..(11): 2-aminoisobutyric acid
  MOD_RES (13)..(13): Alpha-Me S5-pentenyl-alanine olefin amino acid connected by an all-carbon crosslinker comprising one double bond
  MOD_RES (16)..(16): 2-aminoisobutyric acid
  C-term NH2
IWILQALRAIXDAFNXFYAHH

SEQ ID NO: 849 - protein, 21 aa, Artificial Sequence
  Description of Artificial Sequence: Synthetic peptide
  N-term Ac
  MOD_RES (9)..(9): Alpha-Me S5-pentenyl-alanine olefin amino acid connected by an all-carbon crosslinker comprising one double bond
  MISC_FEATURE (9)..(13): Crosslink between residues
  MOD_RES (13)..(13): Alpha-Me S5-pentenyl-alanine olefin amino acid connected by an all-carbon crosslinker comprising one double bond
  MOD_RES (16)..(16): 2-aminoisobutyric acid
  C-term NH2
IAIAQFLRAIGDAFNXFYAHH

SEQ ID NO: 850 - protein, 21 aa, Artificial Sequence
  Description of Artificial Sequence: Synthetic peptide
  N-term Ac
  MOD_RES (9)..(9): Alpha-Me R8-octenyl-alanine olefin amino acid connected by an all-carbon crosslinker comprising one double bond
  MISC_FEATURE (9)..(16): Crosslink between residues
  MOD_RES (16)..(16): Alpha-Me S5-pentenyl-alanine olefin amino acid connected by an all-carbon crosslinker comprising one double bond
  C-term NH2
IWIAQALRAIGDAFNAFYAHH

SEQ ID NO: 851 - protein, 21 aa, Artificial Sequence
  Description of Artificial Sequence: Synthetic peptide
  N-term Ac
  MOD_RES (9)..(9): Alpha-Me R8-octenyl-alanine olefin amino acid connected by an all-carbon crosslinker comprising one double bond
  MISC_FEATURE (9)..(16): Crosslink between residues
  MOD_RES (13)..(13): 2-aminoisobutyric acid
  MOD_RES (16)..(16): Alpha-Me S5-pentenyl-alanine olefin amino acid connected by an all-carbon crosslinker comprising one double bond
  C-term NH2
IWIAQALRAIGDXFNAFYAHH

SEQ ID NO: 852 - protein, 21 aa, Artificial Sequence
  Description of Artificial Sequence: Synthetic peptide
  N-term Ac
  MOD_RES (9)..(9): Alpha-Me S5-pentenyl-alanine olefin amino acid connected by an all-carbon crosslinker comprising one double bond
  MISC_FEATURE (9)..(13): Crosslink between residues
  MOD_RES (13)..(13): Alpha-Me S5-pentenyl-alanine olefin amino acid connected by an all-carbon crosslinker comprising one double bond
  MOD_RES (16)..(16): 2-aminoisobutyric acid
  C-term NH2
IWIAQNLRAIGDAFNXFYAHH

SEQ ID NO: 853 - protein, 21 aa, Artificial Sequence
  Description of Artificial Sequence: Synthetic peptide
  N-term Ac
  MOD_RES (9)..(9): Alpha-Me S5-pentenyl-alanine olefin amino acid connected by an all-carbon crosslinker comprising one double bond
  MISC_FEATURE (9)..(13): Crosslink between residues
  MOD_RES (13)..(13): Alpha-Me S5-pentenyl-alanine olefin amino acid connected by an all-carbon crosslinker comprising one double bond
  MOD_RES (16)..(16): 2-aminoisobutyric acid
  C-term NH2
IWIAQHLRAIGDAFNXFYAHH

SEQ ID NO: 854 - protein, 19 aa, Artificial Sequence
  Description of Artificial Sequence: Synthetic peptide
  N-term Ac
  MOD_RES (9)..(9): Alpha-Me S5-pentenyl-alanine olefin amino acid connected by an all-carbon crosslinker comprising one double bond
  MISC_FEATURE (9)..(13): Crosslink between residues
  MOD_RES (13)..(13): Alpha-Me S5-pentenyl-alanine olefin amino acid connected by an all-carbon crosslinker comprising one double bond
  MOD_RES (16)..(16): 2-aminoisobutyric acid
  C-term NH2
RWIAAQLRAIGDAFNXFYA

SEQ ID NO: 855 - protein, 21 aa, Artificial Sequence
  Description of Artificial Sequence: Synthetic peptide
  N-term Ac
  MOD_RES (9)..(9): Alpha-Me S5-pentenyl-alanine olefin amino acid connected by an all-carbon crosslinker comprising one double bond
  MISC_FEATURE (9)..(13): Crosslink between residues
  MOD_RES (13)..(13): Alpha-Me S5-pentenyl-alanine olefin amino acid connected by an all-carbon crosslinker comprising one double bond
  MOD_RES (16)..(16): 2-aminoisobutyric acid
  C-term NH2
RNIAQALRAIGDAFNXFYAHH

SEQ ID NO: 856 - protein, 21 aa, Artificial Sequence
  Description of Artificial Sequence: Synthetic peptide
  N-term Ac
  MOD_RES (9)..(9): Alpha-Me S5-pentenyl-alanine olefin amino acid connected by an all-carbon crosslinker comprising one double bond
  MISC_FEATURE (9)..(13): Crosslink between residues
  MOD_RES (13)..(13): Alpha-Me S5-pentenyl-alanine olefin amino acid connected by an all-carbon crosslinker comprising one double bond
  MOD_RES (16)..(16): 2-aminoisobutyric acid
  C-term NH2
RFIAQALRAIGDAFNXFYAHH

SEQ ID NO: 857 - protein, 21 aa, Artificial Sequence
  Description of Artificial Sequence: Synthetic peptide
  N-term Ac
  MOD_RES (2)..(2): 2-aminoisobutyric acid
  MOD_RES (9)..(9): Alpha-Me S5-pentenyl-alanine olefin amino acid connected by an all-carbon crosslinker comprising one double bond
  MISC_FEATURE (9)..(13): Crosslink between residues
  MOD_RES (13)..(13): Alpha-Me S5-pentenyl-alanine olefin amino acid connected by an all-carbon crosslinker comprising one double bond
  MOD_RES (16)..(16): 2-aminoisobutyric acid
  C-term NH2
RXIAQALRAIGDAFNXFYAHH

SEQ ID NO: 858 - protein, 21 aa, Artificial Sequence
  Description of Artificial Sequence: Synthetic peptide
  N-term Ac
  MOD_RES (9)..(9): Alpha-Me S5-pentenyl-alanine olefin amino acid connected by an all-carbon crosslinker comprising one double bond
  MISC_FEATURE (9)..(13): Crosslink between residues
  MOD_RES (13)..(13): Alpha-Me S5-pentenyl-alanine olefin amino acid connected by an all-carbon crosslinker comprising one double bond
  MOD_RES (16)..(16): 2-aminoisobutyric acid
  C-term NH2
RAIAQFLRAIGDAFNXFYAHH

SEQ ID NO: 859 - protein, 21 aa, Artificial Sequence
  Description of Artificial Sequence: Synthetic peptide
  N-term Ac
  MOD_RES (9)..(9): Alpha-Me S5-pentenyl-alanine olefin amino acid connected by an all-carbon crosslinker comprising one double bond
  MISC_FEATURE (9)..(13): Crosslink between residues
  MOD_RES (13)..(13): Alpha-Me S5-pentenyl-alanine olefin amino acid connected by an all-carbon crosslinker comprising one double bond
  MOD_RES (16)..(16): 2-aminoisobutyric acid
  C-term NH2
RWIAQLLRAIGDAFNXFYAHH

SEQ ID NO: 860 - protein, 21 aa, Artificial Sequence
  Description of Artificial Sequence: Synthetic peptide
  N-term Ac
  MOD_RES (9)..(9): Alpha-Me S5-pentenyl-alanine olefin amino acid connected by an all-carbon crosslinker comprising one double bond
  MISC_FEATURE (9)..(13): Crosslink between residues
  MOD_RES (13)..(13): Alpha-Me S5-pentenyl-alanine olefin amino acid connected by an all-carbon crosslinker comprising one double bond
  MOD_RES (16)..(16): 2-aminoisobutyric acid
  C-term NH2
RWIAQFLRAIGDAFNXFYAHH

SEQ ID NO: 861 - protein, 21 aa, Artificial Sequence
  Description of Artificial Sequence: Synthetic peptide
  N-term Ac
  MOD_RES (6)..(6): 2-aminoisobutyric acid
  MOD_RES (9)..(9): Alpha-Me S5-pentenyl-alanine olefin amino acid connected by an all-carbon crosslinker comprising one double bond
  MISC_FEATURE (9)..(13): Crosslink between residues
  MOD_RES (13)..(13): Alpha-Me S5-pentenyl-alanine olefin amino acid connected by an all-carbon crosslinker comprising one double bond
  MOD_RES (16)..(16): 2-aminoisobutyric acid
  C-term NH2
RWIAQXLRAIGDAFNXFYAHH

SEQ ID NO: 862 - protein, 21 aa, Artificial Sequence
  Description of Artificial Sequence: Synthetic peptide
  N-term Ac
  MOD_RES (9)..(9): Alpha-Me S5-pentenyl-alanine olefin amino acid connected by an all-carbon crosslinker comprising one double bond
  MISC_FEATURE (9)..(13): Crosslink between residues
  MOD_RES (13)..(13): Alpha-Me S5-pentenyl-alanine olefin amino acid connected by an all-carbon crosslinker comprising one double bond
  MOD_RES (16)..(16): 2-aminoisobutyric acid
  C-term NH2
RWIAQALRAIGDAFNXFYQHH

SEQ ID NO: 863 - protein, 21 aa, Artificial Sequence
  Description of Artificial Sequence: Synthetic peptide
  N-term Ac
  MOD_RES (9)..(9): Alpha-Me S5-pentenyl-alanine olefin amino acid connected by an all-carbon crosslinker comprising one double bond
  MISC_FEATURE (9)..(13): Crosslink between residues
  MOD_RES (13)..(13): Alpha-Me S5-pentenyl-alanine olefin amino acid connected by an all-carbon crosslinker comprising one double bond
  MOD_RES (16)..(16): 2-aminoisobutyric acid
  C-term NH2
RWIAQHLRAIGDAFNXFYAHH

SEQ ID NO: 864 - protein, 21 aa, Artificial Sequence
  Description of Artificial Sequence: Synthetic peptide
  N-term Ac
  MOD_RES (9)..(9): Alpha-Me S5-pentenyl-alanine olefin amino acid connected by an all-carbon crosslinker comprising one double bond
  MISC_FEATURE (9)..(13): Crosslink between residues
  MOD_RES (10)..(10): Norleucine
  MOD_RES (13)..(13): Alpha-Me S5-pentenyl-alanine olefin amino acid connected by an all-carbon crosslinker comprising one double bond
  MOD_RES (16)..(16): 2-aminoisobutyric acid
  C-term NH2
RWIAQALRALGDAFNXFYAHH

SEQ ID NO: 865 - protein, 19 aa, Artificial Sequence
  Description of Artificial Sequence: Synthetic peptide
  N-term Pr
  MOD_RES (7)..(7): Alpha-Me S5-pentenyl-alanine olefin amino acid connected by an all-carbon crosslinker comprising one double bond
  MISC_FEATURE (7)..(11): Crosslink between residues
  MOD_RES (11)..(11): Alpha-Me S5-pentenyl-alanine olefin amino acid connected by an all-carbon crosslinker comprising one double bond
  MOD_RES (14)..(14): 2-aminoisobutyric acid
  C-term NH2
IAQLLRAIGDAFNXFYAHH

SEQ ID NO: 866 - protein, 21 aa, Artificial Sequence
  Description of Artificial Sequence: Synthetic peptide
  N-term Ac
  MOD_RES (9)..(9): Alpha-Me S5-pentenyl-alanine olefin amino acid connected by an all-carbon crosslinker comprising one double bond
  MISC_FEATURE (9)..(13): Crosslink between residues
  MOD_RES (13)..(13): Alpha-Me S5-pentenyl-alanine olefin amino acid connected by an all-carbon crosslinker comprising one double bond
  MOD_RES (16)..(16): 2-aminoisobutyric acid
  C-term NH2
RWIALALRAIGDAFNXFYAHH

SEQ ID NO: 867 - protein, 20 aa, Artificial Sequence
  Description of Artificial Sequence: Synthetic peptide
  N-term Pr
  MOD_RES (8)..(8): Alpha-Me S5-pentenyl-alanine olefin amino acid connected by an all-carbon crosslinker comprising one double bond
  MISC_FEATURE (8)..(12): Crosslink between residues
  MOD_RES (12)..(12): Alpha-Me S5-pentenyl-alanine olefin amino acid connected by an all-carbon crosslinker comprising one double bond
  MOD_RES (15)..(15): 2-aminoisobutyric acid
  C-term NH2
WIALALRAIGDAFNXFYAHH

SEQ ID NO: 868 - protein, 21 aa, Artificial Sequence
  Description of Artificial Sequence: Synthetic peptide
  N-term Ac
  MOD_RES (9)..(9): Alpha-Me S5-pentenyl-alanine olefin amino acid connected by an all-carbon crosslinker comprising one double bond
  MISC_FEATURE (9)..(13): Crosslink between residues
  MOD_RES (13)..(13): Alpha-Me S5-pentenyl-alanine olefin amino acid connected by an all-carbon crosslinker comprising one double bond
  MOD_RES (16)..(16): 2-aminoisobutyric acid
  C-term NH2
RAIAFALRAIGDAFNXFYAHH

SEQ ID NO: 869 - protein, 20 aa, Artificial Sequence
  Description of Artificial Sequence: Synthetic peptide
  N-term Ac
  MOD_RES (8)..(8): Alpha-Me S5-pentenyl-alanine olefin amino acid connected by an all-carbon crosslinker comprising one double bond
  MISC_FEATURE (8)..(12): Crosslink between residues
  MOD_RES (12)..(12): Alpha-Me S5-pentenyl-alanine olefin amino acid connected by an all-carbon crosslinker comprising one double bond
  MOD_RES (15)..(15): 2-aminoisobutyric acid
  C-term NH2
WIAQALRAIGDAFNXFYQHH

SEQ ID NO: 870 - protein, 28 aa, Artificial Sequence
  Description of Artificial Sequence: Synthetic peptide
  N-term Ac
  MOD_RES (7)..(7): Beta-Ala
  MOD_RES (16)..(16): Alpha-Me S5-pentenyl-alanine olefin amino acid connected by an all-carbon crosslinker comprising one double bond
  MISC_FEATURE (16)..(20): Crosslink between residues
  MOD_RES (20)..(20): Alpha-Me S5-pentenyl-alanine olefin amino acid connected by an all-carbon crosslinker comprising one double bond
  MOD_RES (23)..(23): 2-aminoisobutyric acid
  C-term NH2
CCPGCCAIWIAQALRAIGDAFNXFYAHH

SEQ ID NO: 871 - protein, 28 aa, Artificial Sequence
  Description of Artificial Sequence: Synthetic peptide
  N-term Ac
  MOD_RES (7)..(7): Beta-Ala
  MOD_RES (16)..(16): Alpha-Me S5-pentenyl-alanine olefin amino acid connected by an all-carbon crosslinker comprising one double bond
  MISC_FEATURE (16)..(20): Crosslink between residues
  MOD_RES (20)..(20): Alpha-Me S5-pentenyl-alanine olefin amino acid connected by an all-carbon crosslinker comprising one double bond
  MOD_RES (23)..(23): 2-aminoisobutyric acid
  C-term NH2
CCPGCCARWIAQALRAIGDAVNXFYAHH

SEQ ID NO: 872 - protein, 28 aa, Artificial Sequence
  Description of Artificial Sequence: Synthetic peptide
  N-term Ac
  MOD_RES (7)..(7): Beta-Ala
  MOD_RES (16)..(16): Alpha-Me S5-pentenyl-alanine olefin amino acid connected by an all-carbon crosslinker comprising one double bond
  MISC_FEATURE (16)..(20): Crosslink between residues
  MOD_RES (20)..(20): Alpha-Me S5-pentenyl-alanine olefin amino acid connected by an all-carbon crosslinker comprising one double bond
  MOD_RES (23)..(23): 2-aminoisobutyric acid
  C-term NH2
CCPGCCARWIAQALRAIGDALNXFYAHH

SEQ ID NO: 873 - protein, 21 aa, Artificial Sequence
  Description of Artificial Sequence: Synthetic peptide
  N-term Ac
  MOD_RES (9)..(9): Alpha-Me S5-pentenyl-alanine olefin amino acid connected by an all-carbon crosslinker comprising one double bond
  MISC_FEATURE (9)..(13): Crosslink between residues
  MOD_RES (13)..(13): Alpha-Me S5-pentenyl-alanine olefin amino acid connected by an all-carbon crosslinker comprising one double bond
  MOD_RES (16)..(16): 2-aminoisobutyric acid
  C-term NH2
IWIAQALRAIGDAFNXFYQHH

SEQ ID NO: 874 - protein, 21 aa, Artificial Sequence
  Description of Artificial Sequence: Synthetic peptide
  N-term Ac
  MOD_RES (6)..(6): 2-aminoisobutyric acid
  MOD_RES (9)..(9): Alpha-Me R5-pentenyl-alanine olefin amino acid connected by an all-carbon crosslinker comprising one double bond
  MISC_FEATURE (9)..(13): Crosslink between residues
  MOD_RES (13)..(13): Two pentenyl-alanine olefin side chains, each of which is crosslinked to another amino acid as indicated
  MISC_FEATURE (13)..(17): Crosslink between residues
  MOD_RES (17)..(17): Alpha-Me S5-pentenyl-alanine olefin amino acid connected by an all-carbon crosslinker comprising one double bond
  C-term NH2
RWIAQXLRAIGDAFNAAYAHH

SEQ ID NO: 875 - protein, 21 aa, Artificial Sequence
  Description of Artificial Sequence: Synthetic peptide
  N-term Ac
  MOD_RES (9)..(9): Alpha-Me S5-pentenyl-alanine olefin amino acid connected by an all-carbon crosslinker comprising one double bond
  MISC_FEATURE (9)..(13): Crosslink between residues
  MOD_RES (13)..(13): Alpha-Me S5-pentenyl-alanine olefin amino acid connected by an all-carbon crosslinker comprising one double bond
  MOD_RES (16)..(16): 2-aminoisobutyric acid
  C-term NH2
IWIAQLLRAIGDAFNXFYQHH

SEQ ID NO: 876 - protein, 21 aa, Artificial Sequence
  Description of Artificial Sequence: Synthetic peptide
  N-term Ac
  MOD_RES (9)..(9): Alpha-Me S5-pentenyl-alanine olefin amino acid connected by an all-carbon crosslinker comprising one double bond
  MISC_FEATURE (9)..(13): Crosslink between residues
  MOD_RES (13)..(13): Alpha-Me S5-pentenyl-alanine olefin amino acid connected by an all-carbon crosslinker comprising one double bond
  C-term NH2
RWIAQALRAIGDAFNRFYAHH

SEQ ID NO: 877 - protein, 21 aa, Artificial Sequence
  Description of Artificial Sequence: Synthetic peptide
  N-term Ac
  MOD_RES (9)..(9): Alpha-Me S5-pentenyl-alanine olefin amino acid connected by an all-carbon crosslinker comprising one double bond
  MISC_FEATURE (9)..(13): Crosslink between residues
  MOD_RES (13)..(13): Alpha-Me S5-pentenyl-alanine olefin amino acid connected by an all-carbon crosslinker comprising one double bond
  C-term NH2
RWIAQALRAIGDAFNAFYRHH

SEQ ID NO: 878 - protein, 21 aa, Artificial Sequence
  Description of Artificial Sequence: Synthetic peptide
  N-term Ac
  MOD_RES (9)..(9): Alpha-Me S5-pentenyl-alanine olefin amino acid connected by an all-carbon crosslinker comprising one double bond
  MISC_FEATURE (9)..(13): Crosslink between residues
  MOD_RES (13)..(13): Alpha-Me S5-pentenyl-alanine olefin amino acid connected by an all-carbon crosslinker comprising one double bond
  C-term NH2
RWIAQRLRAIGDAFNAFYAHH

SEQ ID NO: 879 - protein, 21 aa, Artificial Sequence
  Description of Artificial Sequence: Synthetic peptide
  N-term Ac
  MOD_RES (9)..(9): Alpha-Me S5-pentenyl-alanine olefin amino acid connected by an all-carbon crosslinker comprising one double bond
  MISC_FEATURE (9)..(13): Crosslink between residues
  MOD_RES (13)..(13): Alpha-Me S5-pentenyl-alanine olefin amino acid connected by an all-carbon crosslinker comprising one double bond
  C-term NH2
RWIAQALRAIGDAFNARYAHH

SEQ ID NO: 880 - protein, 21 aa, Artificial Sequence
  Description of Artificial Sequence: Synthetic peptide
  N-term Ac
  MOD_RES (9)..(9): Alpha-Me S5-pentenyl-alanine olefin amino acid connected by an all-carbon crosslinker comprising one double bond
  MISC_FEATURE (9)..(13): Crosslink between residues
  MOD_RES (13)..(13): Alpha-Me S5-pentenyl-alanine olefin amino acid connected by an all-carbon crosslinker comprising one double bond
  C-term NH2
RWIAERLRAIGDAFNAFYAHH

SEQ ID NO: 881 - protein, 21 aa, Artificial Sequence
  Description of Artificial Sequence: Synthetic peptide
  N-term Ac
  MOD_RES (9)..(9): Alpha-Me S5-pentenyl-alanine olefin amino acid connected by an all-carbon crosslinker comprising one double bond
  MISC_FEATURE (9)..(13): Crosslink between residues
  MOD_RES (13)..(13): Alpha-Me S5-pentenyl-alanine olefin amino acid connected by an all-carbon crosslinker comprising one double bond
  C-term NH2
RWIAQALRAIGDAFNQFYAHH

SEQ ID NO: 882 - protein, 21 aa, Artificial Sequence
  Description of Artificial Sequence: Synthetic peptide
  N-term Ac
  MOD_RES (9)..(9): Alpha-Me S5-pentenyl-alanine olefin amino acid connected by an all-carbon crosslinker comprising one double bond
  MISC_FEATURE (9)..(13): Crosslink between residues
  MOD_RES (13)..(13): Alpha-Me S5-pentenyl-alanine olefin amino acid connected by an all-carbon crosslinker comprising one double bond
  C-term NH2
RWIAQALRAIGDAFNAFYQHH

SEQ ID NO: 883 - protein, 21 aa, Artificial Sequence
  Description of Artificial Sequence: Synthetic peptide
  N-term Ac
  MOD_RES (9)..(9): Alpha-Me S5-pentenyl-alanine olefin amino acid connected by an all-carbon crosslinker comprising one double bond
  MISC_FEATURE (9)..(13): Crosslink between residues
  MOD_RES (13)..(13): Alpha-Me S5-pentenyl-alanine olefin amino acid connected by an all-carbon crosslinker comprising one double bond
  C-term NH2
RWIAQELRAIGDAFNARYAHH

SEQ ID NO: 884 - protein, 21 aa, Artificial Sequence
  Description of Artificial Sequence: Synthetic peptide
  N-term Ac
  MOD_RES (9)..(9): Alpha-Me S5-pentenyl-alanine olefin amino acid connected by an all-carbon crosslinker comprising one double bond
  MISC_FEATURE (9)..(13): Crosslink between residues
  MOD_RES (13)..(13): Alpha-Me S5-pentenyl-alanine olefin amino acid connected by an all-carbon crosslinker comprising one double bond
  C-term NH2
RWIAQALRAIGDAFNAQYAHH

SEQ ID NO: 885 - protein, 21 aa, Artificial Sequence
  Description of Artificial Sequence: Synthetic peptide
  N-term Ac
  MOD_RES (9)..(9): Alpha-Me S5-pentenyl-alanine olefin amino acid connected by an all-carbon crosslinker comprising one double bond
  MISC_FEATURE (9)..(13): Crosslink between residues
  MOD_RES (13)..(13): Alpha-Me S5-pentenyl-alanine olefin amino acid connected by an all-carbon crosslinker comprising one double bond
  C-term NH2
RWIAQQLRAIGDAQNQQYQHH

SEQ ID NO: 886 - protein, 21 aa, Artificial Sequence
  Description of Artificial Sequence: Synthetic peptide
  N-term Ac
  MOD_RES (9)..(9): Alpha-Me S5-pentenyl-alanine olefin amino acid connected by an all-carbon crosslinker comprising one double bond
  MISC_FEATURE (9)..(13): Crosslink between residues
  MOD_RES (13)..(13): Alpha-Me S5-pentenyl-alanine olefin amino acid connected by an all-carbon crosslinker comprising one double bond
  MOD_RES (16)..(16): 2-aminoisobutyric acid
  C-term NH2
IWIAAFLRAIGDAFNXFYAHH

SEQ ID NO: 887 - protein, 21 aa, Artificial Sequence
  Description of Artificial Sequence: Synthetic peptide
  N-term Ac
  MOD_RES (9)..(9): Alpha-Me S5-pentenyl-alanine olefin amino acid connected by an all-carbon crosslinker comprising one double bond
  MISC_FEATURE (9)..(13): Crosslink between residues
  MOD_RES (13)..(13): Alpha-Me S5-pentenyl-alanine olefin amino acid connected by an all-carbon crosslinker comprising one double bond
  MOD_RES (15)..(15): Norleucine
  MOD_RES (16)..(16): 2-aminoisobutyric acid
  C-term NH2
IWIAQALRAIGDAFLXFYAHH

SEQ ID NO: 888 - protein, 21 aa, Artificial Sequence
  Description of Artificial Sequence: Synthetic peptide
  N-term Ac
  MOD_RES (9)..(9): Alpha-Me S5-pentenyl-alanine olefin amino acid connected by an all-carbon crosslinker comprising one double bond
  MISC_FEATURE (9)..(13): Crosslink between residues
  MOD_RES (13)..(13): Alpha-Me S5-pentenyl-alanine olefin amino acid connected by an all-carbon crosslinker comprising one double bond
  MOD_RES (15)..(15): Norleucine
  MOD_RES (16)..(16): 2-aminoisobutyric acid
  C-term NH2
IWIAQALRAIGDAFLXFYQHH

SEQ ID NO: 889 - protein, 21 aa, Artificial Sequence
  Description of Artificial Sequence: Synthetic peptide
  N-term Ac
  MOD_RES (6)..(6): 2-aminoisobutyric acid
  MOD_RES (9)..(9): Alpha-Me S5-pentenyl-alanine olefin amino acid connected by an all-carbon crosslinker comprising one double bond
  MISC_FEATURE (9)..(13): Crosslink between residues
  MOD_RES (13)..(13): Alpha-Me S5-pentenyl-alanine olefin amino acid connected by an all-carbon crosslinker comprising one double bond
  MOD_RES (16)..(16): 2-aminoisobutyric acid
  C-term NH2
IWIAQXLRAIGDAVNXFYAHH

SEQ ID NO: 890 - protein, 21 aa, Artificial Sequence
  Description of Artificial Sequence: Synthetic peptide
  N-term Ac
  MOD_RES (9)..(9): Alpha-Me S5-pentenyl-alanine olefin amino acid connected by an all-carbon crosslinker comprising one double bond
  MISC_FEATURE (9)..(13): Crosslink between residues
  MOD_RES (13)..(13): Alpha-Me S5-pentenyl-alanine olefin amino acid connected by an all-carbon crosslinker comprising one double bond
  MOD_RES (16)..(16): 2-aminoisobutyric acid
  C-term NH2
IWIAQLLRAIGDAVNXFYAHH

SEQ ID NO: 891 - protein, 21 aa, Artificial Sequence
  Description of Artificial Sequence: Synthetic peptide
  N-term Ac
  MOD_RES (9)..(9): Alpha-Me S5-pentenyl-alanine olefin amino acid connected by an all-carbon crosslinker comprising one double bond
  MISC_FEATURE (9)..(13): Crosslink between residues
  MOD_RES (13)..(13): Alpha-Me S5-pentenyl-alanine olefin amino acid connected by an all-carbon crosslinker comprising one double bond
  MOD_RES (16)..(16): 2-aminoisobutyric acid
  C-term NH2
IWIAQAARAIGDAVNXFYAHH

SEQ ID NO: 892 - protein, 21 aa, Artificial Sequence
  Description of Artificial Sequence: Synthetic peptide
  N-term Ac
  MOD_RES (9)..(9): Alpha-Me S5-pentenyl-alanine olefin amino acid connected by an all-carbon crosslinker comprising one double bond
  MISC_FEATURE (9)..(13): Crosslink between residues
  MOD_RES (13)..(13): Alpha-Me S5-pentenyl-alanine olefin amino acid connected by an all-carbon crosslinker comprising one double bond
  MOD_RES (16)..(16): 2-aminoisobutyric acid
  C-term NH2
IAIAFALRAIGDAVNXFYAHH

SEQ ID NO: 893 - protein, 21 aa, Artificial Sequence
  Description of Artificial Sequence: Synthetic peptide
  N-term Ac
  MOD_RES (9)..(9): Alpha-Me S5-pentenyl-alanine olefin amino acid connected by an all-carbon crosslinker comprising one double bond
  MISC_FEATURE (9)..(13): Crosslink between residues
  MOD_RES (13)..(13): Alpha-Me S5-pentenyl-alanine olefin amino acid connected by an all-carbon crosslinker comprising one double bond
  MOD_RES (16)..(16): 2-aminoisobutyric acid
  C-term NH2
IWIALALRAIGDAVNXFYAHH

SEQ ID NO: 894 - protein, 21 aa, Artificial Sequence
  Description of Artificial Sequence: Synthetic peptide
  N-term Ac
  MOD_RES (9)..(9): Alpha-Me S5-pentenyl-alanine olefin amino acid connected by an all-carbon crosslinker comprising one double bond
  MISC_FEATURE (9)..(13): Crosslink between residues
  MOD_RES (13)..(13): Alpha-Me S5-pentenyl-alanine olefin amino acid connected by an all-carbon crosslinker comprising one double bond
  MOD_RES (16)..(16): 2-aminoisobutyric acid
  C-term NH2
IWIAQALRAIGDAVNXFYQHH

SEQ ID NO: 895 - protein, 21 aa, Artificial Sequence
  Description of Artificial Sequence: Synthetic peptide
  N-term Ac
  MOD_RES (9)..(9): Alpha-Me azide 1,4 triazole (4 carbon) amino acid
  MISC_FEATURE (9)..(13): Crosslink between residues
  MOD_RES (13)..(13): Alpha-Me alkyne 1,4 triazole (3 carbon) amino acid
  C-term NH2
IWIAQELRXIGDXFNAYYARR

SEQ ID NO: 896 - protein, 21 aa, Artificial Sequence
  Description of Artificial Sequence: Synthetic peptide
  N-term Ac
  MOD_RES (9)..(9): Alpha-Me alkyne 1,4 triazole (3 carbon) amino acid
  MISC_FEATURE (9)..(13): Crosslink between residues
  MOD_RES (13)..(13): Alpha-Me azide 1,4 triazole (4 carbon) amino acid
  C-term NH2
IWIAQELRXIGDXFNAYYARR

SEQ ID NO: 897 - protein, 21 aa, Artificial Sequence
  Description of Artificial Sequence: Synthetic peptide
  N-term Ac
  MOD_RES (9)..(9): Alpha-Me azide 1,5 triazole (3 carbon) amino acid
  MISC_FEATURE (9)..(13): Crosslink between residues
  MOD_RES (13)..(13): Alpha-Me alkyne 1,4 triazole (5 carbon) amino acid
  C-term NH2
IWIAQELRXIGDXFNAYYARR

SEQ ID NO: 898 - protein, 21 aa, Artificial Sequence
  Description of Artificial Sequence: Synthetic peptide
  N-term Ac
  MOD_RES (9)..(9): Alpha-Me alkyne 1,4 triazole (5 carbon) amino acid
  MISC_FEATURE (9)..(13): Crosslink between residues
  MOD_RES (13)..(13): Alpha-Me azide 1,5 triazole (3 carbon) amino acid
  C-term NH2
IWIAQELRXIGDXFNAYYARR

SEQ ID NO: 899 - protein, 21 aa, Artificial Sequence
  Description of Artificial Sequence: Synthetic peptide
  N-term Ac
  MOD_RES (9)..(9): Alpha-Me azide 1,4 triazole (5 carbon) amino acid
  MISC_FEATURE (9)..(13): Crosslink between residues
  MOD_RES (13)..(13): Alpha-Me alkyne 1,4 triazole (5 carbon) amino acid
  C-term NH2
IWIAQELRXIGDXFNAYYARR

SEQ ID NO: 900 - protein, 21 aa, Artificial Sequence
  Description of Artificial Sequence: Synthetic peptide
  N-term Ac
  MOD_RES (9)..(9): Alpha-Me alkyne 1,4 triazole (5 carbon) amino acid
  MISC_FEATURE (9)..(13): Crosslink between residues
  MOD_RES (13)..(13): Alpha-Me azide 1,4 triazole (5 carbon) amino acid
  C-term NH2
IWIAQELRXIGDXFNAYYARR

SEQ ID NO: 901 - protein, 21 aa, Artificial Sequence
  Description of Artificial Sequence: Synthetic peptide
  N-term Ac
  MOD_RES (2)..(2): Cou
  MOD_RES (9)..(9): Alpha-Me S5-pentenyl-alanine olefin amino acid connected by an all-carbon crosslinker comprising one double bond
  MISC_FEATURE (9)..(13): Crosslink between residues
  MOD_RES (13)..(13): Alpha-Me S5-pentenyl-alanine olefin amino acid connected by an all-carbon crosslinker comprising one double bond
  MOD_RES (16)..(16): 2-aminoisobutyric acid
  C-term NH2
RXIAQALRAIGDALNXFYAHH

SEQ ID NO: 902 - protein, 21 aa, Artificial Sequence
  Description of Artificial Sequence: Synthetic peptide
  N-term Ac
  MOD_RES (2)..(2): Cou
  MOD_RES (9)..(9): Alpha-Me R5-pentenyl-alanine olefin amino acid connected by an all-carbon crosslinker comprising one double bond
  MISC_FEATURE (9)..(13): Crosslink between residues
  MOD_RES (13)..(13): Two pentenyl-alanine olefin side chains, each of which is crosslinked to another amino acid as indicated
  MISC_FEATURE (13)..(17): Crosslink between residues
  MOD_RES (17)..(17): Alpha-Me S5-pentenyl-alanine olefin amino acid connected by an all-carbon crosslinker comprising one double bond
  C-term NH2
RXIAQALRAIGDAFNAAYAHH

SEQ ID NO: 903 - protein, 21 aa, Artificial Sequence
  Description of Artificial Sequence: Synthetic peptide
  N-term Ac
  MOD_RES (2)..(2): Cou
  MOD_RES (16)..(16): 2-aminoisobutyric acid
  C-term NH2
IXIAQALRRIGDELNXFYAHH

SEQ ID NO: 904 - protein, 21 aa, Artificial Sequence
  Description of Artificial Sequence: Synthetic peptide
  N-term Ac
  MOD_RES (2)..(2): Cou
  C-term NH2
RXIAQALRRIGDEFNAFYAHH

SEQ ID NO: 905 - protein, 21 aa, Artificial Sequence
  Description of Artificial Sequence: Synthetic peptide
  N-term Ac
  MOD_RES (9)..(9): Alpha-Me S5-pentenyl-alanine olefin amino acid connected by an all-carbon crosslinker comprising one double bond
  MISC_FEATURE (9)..(13): Crosslink between residues
  MOD_RES (13)..(13): Alpha-Me S5-pentenyl-alanine olefin amino acid connected by an all-carbon crosslinker comprising one double bond
  MOD_RES (19)..(19): 2-aminoisobutyric acid
  C-term NH2
IWIAQALRAIGDAFNAFYXHH

SEQ ID NO: 906 - protein, 21 aa, Artificial Sequence
  Description of Artificial Sequence: Synthetic peptide
  N-term Ac
  MOD_RES (9)..(9): Alpha-Me S5-pentenyl-alanine olefin amino acid connected by an all-carbon crosslinker comprising one double bond
  MISC_FEATURE (9)..(13): Crosslink between residues
  MOD_RES (13)..(13): Alpha-Me S5-pentenyl-alanine olefin amino acid connected by an all-carbon crosslinker comprising one double bond
  MOD_RES (16)..(16): 2-aminoisobutyric acid
  C-term NH2
IWIALALRAIGDAFNXFYAHH

SEQ ID NO: 907 - protein, 21 aa, Artificial Sequence
  Description of Artificial Sequence: Synthetic peptide
  N-term Ac
  MOD_RES (9)..(9): Alpha-Me S5-pentenyl-alanine olefin amino acid connected by an all-carbon crosslinker comprising one double bond
  MISC_FEATURE (9)..(13): Crosslink between residues
  MOD_RES (13)..(13): Alpha-Me S5-pentenyl-alanine olefin amino acid connected by an all-carbon crosslinker comprising one double bond
  MOD_RES (16)..(16): 2-aminoisobutyric acid
  C-term NH2
IAIAFALRAIGDAFNXFYAHH

SEQ ID NO: 908 - protein, 21 aa, Artificial Sequence
  Description of Artificial Sequence: Synthetic peptide
  N-term Ac
  MOD_RES (9)..(9): Alpha-Me S5-pentenyl-alanine olefin amino acid connected by an all-carbon crosslinker comprising one double bond
  MISC_FEATURE (9)..(13): Crosslink between residues
  MOD_RES (13)..(13): Alpha-Me S5-pentenyl-alanine olefin amino acid connected by an all-carbon crosslinker comprising one double bond
  MOD_RES (16)..(16): 2-aminoisobutyric acid
  C-term NH2
RWIAQHLRAIGDAVNXFYAHH

SEQ ID NO: 909 - protein, 21 aa, Artificial Sequence
  Description of Artificial Sequence: Synthetic peptide
  N-term Ac
  MOD_RES (9)..(9): Alpha-Me S5-pentenyl-alanine olefin amino acid connected by an all-carbon crosslinker comprising one double bond
  MISC_FEATURE (9)..(13): Crosslink between residues
  MOD_RES (13)..(13): Alpha-Me S5-pentenyl-alanine olefin amino acid connected by an all-carbon crosslinker comprising one double bond
  MOD_RES (16)..(16): 2-aminoisobutyric acid
  C-term NH2
IWIAQHLRAIGDAVNXFYAHH

SEQ ID NO: 910 - protein, 21 aa, Artificial Sequence
  Description of Artificial Sequence: Synthetic peptide
  N-term Ac
  MOD_RES (9)..(9): Alpha-Me S5-pentenyl-alanine olefin amino acid connected by an all-carbon crosslinker comprising one double bond
  MISC_FEATURE (9)..(13): Crosslink between residues
  MOD_RES (13)..(13): Alpha-Me S5-pentenyl-alanine olefin amino acid connected by an all-carbon crosslinker comprising one double bond
  MOD_RES (16)..(16): 2-aminoisobutyric acid
  C-term NH2
RWIAQLLRAIGDAVNXFYAHH

SEQ ID NO: 911 - protein, 21 aa, Artificial Sequence
  Description of Artificial Sequence: Synthetic peptide
  N-term Ac
  MOD_RES (9)..(9): Alpha-Me S5-pentenyl-alanine olefin amino acid connected by an all-carbon crosslinker comprising one double bond
  MISC_FEATURE (9)..(13): Crosslink between residues
  MOD_RES (13)..(13): Alpha-Me S5-pentenyl-alanine olefin amino acid connected by an all-carbon crosslinker comprising one double bond
  MOD_RES (16)..(16): 2-aminoisobutyric acid
  C-term NH2
IWIAQLLRAIGDAVNXFYAHH

SEQ ID NO: 912 - protein, 21 aa, Artificial Sequence
  Description of Artificial Sequence: Synthetic peptide
  N-term Ac
  MOD_RES (9)..(9): Alpha-Me S5-pentenyl-alanine olefin amino acid connected by an all-carbon crosslinker comprising one double bond
  MISC_FEATURE (9)..(13): Crosslink between residues
  MOD_RES (13)..(13): Alpha-Me S5-pentenyl-alanine olefin amino acid connected by an all-carbon crosslinker comprising one double bond
  MOD_RES (16)..(16): 2-aminoisobutyric acid
  C-term NH2
IWIAQFLRAIGDAVNXFYAHH

SEQ ID NO: 913 - protein, 21 aa, Artificial Sequence
  Description of Artificial Sequence: Synthetic peptide
  N-term Ac
  MOD_RES (9)..(9): Alpha-Me S5-pentenyl-alanine olefin amino acid connected by an all-carbon crosslinker comprising one double bond
  MISC_FEATURE (9)..(13): Crosslink between residues
  MOD_RES (13)..(13): Alpha-Me S5-pentenyl-alanine olefin amino acid connected by an all-carbon crosslinker comprising one double bond
  MOD_RES (16)..(16): 2-aminoisobutyric acid
  C-term NH2
IWIAQALRAIGDAHNXFYAHH

SEQ ID NO: 914 - protein, 21 aa, Artificial Sequence
  Description of Artificial Sequence: Synthetic peptide
  N-term Ac
  MOD_RES (9)..(9): Alpha-Me S5-pentenyl-alanine olefin amino acid connected by an all-carbon crosslinker comprising one double bond
  MISC_FEATURE (9)..(13): Crosslink between residues
  MOD_RES (13)..(13): Alpha-Me S5-pentenyl-alanine olefin amino acid connected by an all-carbon crosslinker comprising one double bond
  MOD_RES (16)..(16): 2-aminoisobutyric acid
  C-term NH2
IWIAHLLRAIGDAVNXFYAHH

SEQ ID NO: 915 - protein, 21 aa, Artificial Sequence
  Description of Artificial Sequence: Synthetic peptide
  N-term Ac
  MOD_RES (9)..(9): Alpha-Me S5-pentenyl-alanine olefin amino acid connected by an all-carbon crosslinker comprising one double bond
  MISC_FEATURE (9)..(13): Crosslink between residues
  MOD_RES (13)..(13): Alpha-Me S5-pentenyl-alanine olefin amino acid connected by an all-carbon crosslinker comprising one double bond
  MOD_RES (16)..(16): 2-aminoisobutyric acid
  C-term NH2
IWIAQALRAIGDAINXFYAHH

SEQ ID NO: 916 - protein, 21 aa, Artificial Sequence
  Description of Artificial Sequence: Synthetic peptide
  N-term Ac
  MOD_RES (9)..(9): Alpha-Me S5-pentenyl-alanine olefin amino acid connected by an all-carbon crosslinker comprising one double bond
  MISC_FEATURE (9)..(13): Crosslink between residues
  MOD_RES (13)..(13): Alpha-Me S5-pentenyl-alanine olefin amino acid connected by an all-carbon crosslinker comprising one double bond
  MOD_RES (16)..(16): 2-aminoisobutyric acid
  C-term NH2
IWIAQLLRAIGDAINXFYAHH

SEQ ID NO: 917 - protein, 21 aa, Artificial Sequence
  Description of Artificial Sequence: Synthetic peptide
  N-term Ac
  MOD_RES (9)..(9): Alpha-Me S5-pentenyl-alanine olefin amino acid connected by an all-carbon crosslinker comprising one double bond
  MISC_FEATURE (9)..(13): Crosslink between residues
  MOD_RES (13)..(13): Alpha-Me S5-pentenyl-alanine olefin amino acid connected by an all-carbon crosslinker comprising one double bond
  MOD_RES (16)..(16): 2-aminoisobutyric acid
  C-term NH2
IHIAQLLRAIGDAFNXFYAHH

SEQ ID NO: 918 - protein, 21 aa, Artificial Sequence
  Description of Artificial Sequence: Synthetic peptide
  N-term Ac
  MOD_RES (9)..(9): Alpha-Me S5-pentenyl-alanine olefin amino acid connected by an all-carbon crosslinker comprising one double bond
  MISC_FEATURE (9)..(13): Crosslink between residues
  MOD_RES (13)..(13): Alpha-Me S5-pentenyl-alanine olefin amino acid connected by an all-carbon crosslinker comprising one double bond
  MOD_RES (16)..(16): 2-aminoisobutyric acid
  C-term NH2
IHIAQLLRAIGDAVNXFYAHH

SEQ ID NO: 919 - protein, 21 aa, Artificial Sequence
  Description of Artificial Sequence: Synthetic peptide
  N-term Ac
  MOD_RES (9)..(9): Alpha-Me S5-pentenyl-alanine olefin amino acid connected by an all-carbon crosslinker comprising one double bond
  MISC_FEATURE (9)..(13): Crosslink between residues
  MOD_RES (13)..(13): Alpha-Me S5-pentenyl-alanine olefin amino acid connected by an all-carbon crosslinker comprising one double bond
  MOD_RES (16)..(16): 2-aminoisobutyric acid
  C-term NH2
IWIAQLLRAIGDAVNXFYAHA

SEQ ID NO: 920 - protein, 21 aa, Artificial Sequence
  Description of Artificial Sequence: Synthetic peptide
  N-term Ac
  MOD_RES (9)..(9): Alpha-Me S5-pentenyl-alanine olefin amino acid connected by an all-carbon crosslinker comprising one double bond
  MISC_FEATURE (9)..(13): Crosslink between residues
  MOD_RES (13)..(13): Alpha-Me S5-pentenyl-alanine olefin amino acid connected by an all-carbon crosslinker comprising one double bond
  MOD_RES (16)..(16): 2-aminoisobutyric acid
  C-term NH2
IWIAQLLRAIGDAVNXFYAAH

SEQ ID NO: 921 - protein, 21 aa, Artificial Sequence
  Description of Artificial Sequence: Synthetic peptide
  N-term Ac
  MOD_RES (9)..(9): Alpha-Me S5-pentenyl-alanine olefin amino acid connected by an all-carbon crosslinker comprising one double bond
  MISC_FEATURE (9)..(13): Crosslink between residues
  MOD_RES (13)..(13): Alpha-Me S5-pentenyl-alanine olefin amino acid connected by an all-carbon crosslinker comprising one double bond
  MOD_RES (16)..(16): 2-aminoisobutyric acid
  C-term NH2
RWIAQALDAIGRAVNXFYAHH

SEQ ID NO: 922 - protein, 21 aa, Artificial Sequence
  Description of Artificial Sequence: Synthetic peptide
  N-term Ac
  MOD_RES (9)..(9): Alpha-Me S5-pentenyl-alanine olefin amino acid connected by an all-carbon crosslinker comprising one double bond
  MISC_FEATURE (9)..(13): Crosslink between residues
  MOD_RES (13)..(13): Alpha-Me S5-pentenyl-alanine olefin amino acid connected by an all-carbon crosslinker comprising one double bond
  MOD_RES (16)..(16): 2-aminoisobutyric acid
  C-term NH2
RWIAQALDAIGDAVNXFYAHH

SEQ ID NO: 923 - protein, 21 aa, Artificial Sequence
  Description of Artificial Sequence: Synthetic peptide
  N-term Ac
  MOD_RES (9)..(9): Alpha-Me S5-pentenyl-alanine olefin amino acid connected by an all-carbon crosslinker comprising one double bond
  MISC_FEATURE (9)..(13): Crosslink between residues
  MOD_RES (13)..(13): Alpha-Me S5-pentenyl-alanine olefin amino acid connected by an all-carbon crosslinker comprising one double bond
  MOD_RES (16)..(16): 2-aminoisobutyric acid
  C-term NH2
IWIAQALDAIGRAVNXFYAHH

SEQ ID NO: 924 - protein, 21 aa, Artificial Sequence
  Description of Artificial Sequence: Synthetic peptide
  N-term Ac
  MOD_RES (9)..(9): Alpha-Me S5-pentenyl-alanine olefin amino acid connected by an all-carbon crosslinker comprising one double bond
  MISC_FEATURE (9)..(13): Crosslink between residues
  MOD_RES (11)..(11): 2-aminoisobutyric acid
  MOD_RES (13)..(13): Alpha-Me S5-pentenyl-alanine olefin amino acid connected by an all-carbon crosslinker comprising one double bond
  MOD_RES (16)..(16): 2-aminoisobutyric acid
  C-term NH2
RWIAQAARAIXDAVNXFYAHH

SEQ ID NO: 925 - protein, 21 aa, Artificial Sequence
  Description of Artificial Sequence: Synthetic peptide
  N-term Ac
  MOD_RES (9)..(9): Alpha-Me S5-pentenyl-alanine olefin amino acid connected by an all-carbon crosslinker comprising one double bond
  MISC_FEATURE (9)..(13): Crosslink between residues
  MOD_RES (13)..(13): Alpha-Me S5-pentenyl-alanine olefin amino acid connected by an all-carbon crosslinker comprising one double bond
  MOD_RES (16)..(16): 2-aminoisobutyric acid
  C-term NH2
IWIAQALDAIGRAFNXFYAHH

SEQ ID NO: 926 - protein, 21 aa, Artificial Sequence
  Description of Artificial Sequence: Synthetic peptide
  N-term Ac
  MOD_RES (9)..(9): Alpha-Me S5-pentenyl-alanine olefin amino acid connected by an all-carbon crosslinker comprising one double bond
  MISC_FEATURE (9)..(13): Crosslink between residues
  MOD_RES (13)..(13): Alpha-Me S5-pentenyl-alanine olefin amino acid connected by an all-carbon crosslinker comprising one double bond
  MOD_RES (16)..(16): 2-aminoisobutyric acid
  C-term NH2
IWIAQALDAIGDAFNXFYAHH

SEQ ID NO: 927 - protein, 21 aa, Artificial Sequence
  Description of Artificial Sequence: Synthetic peptide
  N-term Ac
  MOD_RES (9)..(9): Alpha-Me S5-pentenyl-alanine olefin amino acid connected by an all-carbon crosslinker comprising one double bond
  MISC_FEATURE (9)..(13): Crosslink between residues
  MOD_RES (11)..(11): 2-aminoisobutyric acid
  MOD_RES (13)..(13): Alpha-Me S5-pentenyl-alanine olefin amino acid connected by an all-carbon crosslinker comprising one double bond
  MOD_RES (16)..(16): 2-aminoisobutyric acid
  C-term NH2
IWIAQAARAIXDAFNXFYAHH

SEQ ID NO: 928 - protein, 21 aa, Artificial Sequence
  Description of Artificial Sequence: Synthetic peptide
  N-term Ac
  MOD_RES (9)..(9): Alpha-Me R5-pentenyl-alanine olefin amino acid connected by an all-carbon crosslinker comprising one double bond
  MISC_FEATURE (9)..(13): Crosslink between residues
  MOD_RES (13)..(13): Two pentenyl-alanine olefin side chains, each of which is crosslinked to another amino acid as indicated
  MISC_FEATURE (13)..(17): Crosslink between residues
  MOD_RES (17)..(17): Alpha-Me S5-pentenyl-alanine olefin amino acid connected by an all-carbon crosslinker comprising one double bond
  C-term NH2
RWIAQALDAIGRAFNAAYAHH

SEQ ID NO: 929 - protein, 21 aa, Artificial Sequence
  Description of Artificial Sequence: Synthetic peptide
  N-term Ac
  MOD_RES (9)..(9): Alpha-Me R5-pentenyl-alanine olefin amino acid connected by an all-carbon crosslinker comprising one double bond
  MISC_FEATURE (9)..(13): Crosslink between residues
  MOD_RES (13)..(13): Two pentenyl-alanine olefin side chains, each of which is crosslinked to another amino acid as indicated
  MISC_FEATURE (13)..(17): Crosslink between residues
  MOD_RES (17)..(17): Alpha-Me S5-pentenyl-alanine olefin amino acid connected by an all-carbon crosslinker comprising one double bond
  C-term NH2
IWIAQALRAIGDAFNAAYAHH

SEQ ID NO: 930 - protein, 21 aa, Artificial Sequence
  Description of Artificial Sequence: Synthetic peptide
  N-term Ac
  MOD_RES (9)..(9): Alpha-Me S5-pentenyl-alanine olefin amino acid connected by an all-carbon crosslinker comprising one double bond
  MISC_FEATURE (9)..(13): Crosslink between residues
  MOD_RES (13)..(13): Alpha-Me S5-pentenyl-alanine olefin amino acid connected by an all-carbon crosslinker comprising one double bond
  MOD_RES (16)..(16): 2-aminoisobutyric acid
  C-term NH2
RWIAAQLRAIGDAVNXFYAHH

SEQ ID NO: 931 - protein, 21 aa, Artificial Sequence
  Description of Artificial Sequence: Synthetic peptide
  N-term Ac
  MOD_RES (9)..(9): Alpha-Me S5-pentenyl-alanine olefin amino acid connected by an all-carbon crosslinker comprising one double bond
  MISC_FEATURE (9)..(13): Crosslink between residues
  MOD_RES (13)..(13): Alpha-Me S5-pentenyl-alanine olefin amino acid connected by an all-carbon crosslinker comprising one double bond
  MOD_RES (16)..(16): 2-aminoisobutyric acid
  C-term NH2
IWIAAQLRAIGDAFNXFYAHH

SEQ ID NO: 932 - protein, 21 aa, Artificial Sequence
  Description of Artificial Sequence: Synthetic peptide
  N-term Ac
  MOD_RES (3)..(3): Norleucine
  MOD_RES (9)..(9): Alpha-Me S5-pentenyl-alanine olefin amino acid connected by an all-carbon crosslinker comprising one double bond
  MISC_FEATURE (9)..(13): Crosslink between residues
  MOD_RES (13)..(13): Alpha-Me S5-pentenyl-alanine olefin amino acid connected by an all-carbon crosslinker comprising one double bond
  MOD_RES (16)..(16): 2-aminoisobutyric acid
  C-term NH2
IWLAQLLRAIGDAFNXFYAHH

SEQ ID NO: 933 - protein, 21 aa, Artificial Sequence
  Description of Artificial Sequence: Synthetic peptide
  N-term Ac
  MOD_RES (3)..(3): Norleucine
  MOD_RES (9)..(9): Alpha-Me S5-pentenyl-alanine olefin amino acid connected by an all-carbon crosslinker comprising one double bond
  MISC_FEATURE (9)..(13): Crosslink between residues
  MOD_RES (13)..(13): Alpha-Me S5-pentenyl-alanine olefin amino acid connected by an all-carbon crosslinker comprising one double bond
  MOD_RES (16)..(16): 2-aminoisobutyric acid
  C-term NH2
RWLAQLLRAIGDAVNXFYAHH

SEQ ID NO: 934 - protein, 21 aa, Artificial Sequence
  Description of Artificial Sequence: Synthetic peptide
  N-term Ac
  MOD_RES (3)..(3): Norleucine
  MOD_RES (4)..(4): 2-aminoisobutyric acid
  MOD_RES (9)..(9): Alpha-Me S5-pentenyl-alanine olefin amino acid connected by an all-carbon crosslinker comprising one double bond
  MISC_FEATURE (9)..(13): Crosslink between residues
  MOD_RES (13)..(13): Alpha-Me S5-pentenyl-alanine olefin amino acid connected by an all-carbon crosslinker comprising one double bond
  MOD_RES (16)..(16): 2-aminoisobutyric acid
  C-term NH2
IWLXQLLRAIGDAFNXFYAHH

SEQ ID NO: 935 - protein, 21 aa, Artificial Sequence
  Description of Artificial Sequence: Synthetic peptide
  N-term Ac
  MOD_RES (3)..(3): Norleucine
  MOD_RES (4)..(4): 2-aminoisobutyric acid
  MOD_RES (9)..(9): Alpha-Me S5-pentenyl-alanine olefin amino acid connected by an all-carbon crosslinker comprising one double bond
  MISC_FEATURE (9)..(13): Crosslink between residues
  MOD_RES (13)..(13): Alpha-Me S5-pentenyl-alanine olefin amino acid connected by an all-carbon crosslinker comprising one double bond
  MOD_RES (16)..(16): 2-aminoisobutyric acid
  C-term NH2
RWLXQLLRAIGDAVNXFYAHH

SEQ ID NO: 936 - protein, 21 aa, Artificial Sequence
  Description of Artificial Sequence: Synthetic peptide
  N-term Ac
  MOD_RES (9)..(9): Alpha-Me S5-pentenyl-alanine olefin amino acid connected by an all-carbon crosslinker comprising one double bond
  MISC_FEATURE (9)..(13): Crosslink between residues
  MOD_RES (13)..(13): Alpha-Me S5-pentenyl-alanine olefin amino acid connected by an all-carbon crosslinker comprising one double bond
  MOD_RES (16)..(16): 2-aminoisobutyric acid
  C-term NH2
IRIAQLLRAIGDAFNXFYAHH

SEQ ID NO: 937 - protein, 21 aa, Artificial Sequence
  Description of Artificial Sequence: Synthetic peptide
  N-term Ac
  MOD_RES (9)..(9): Alpha-Me S5-pentenyl-alanine olefin amino acid connected by an all-carbon crosslinker comprising one double bond
  MISC_FEATURE (9)..(13): Crosslink between residues
  MOD_RES (13)..(13): Alpha-Me S5-pentenyl-alanine olefin amino acid connected by an all-carbon crosslinker comprising one double bond
  MOD_RES (16)..(16): 2-aminoisobutyric acid
  C-term NH2
ISIAQLLRAIGDAFNXFYAHH

SEQ ID NO: 938 - protein, 21 aa, Artificial Sequence
  Description of Artificial Sequence: Synthetic peptide
  N-term Ac
  MOD_RES (4)..(4): 2-aminoisobutyric acid
  MOD_RES (9)..(9): Alpha-Me S5-pentenyl-alanine olefin amino acid connected by an all-carbon crosslinker comprising one double bond
  MISC_FEATURE (9)..(13): Crosslink between residues
  MOD_RES (13)..(13): Alpha-Me S5-pentenyl-alanine olefin amino acid connected by an all-carbon crosslinker comprising one double bond
  MOD_RES (16)..(16): 2-aminoisobutyric acid
  C-term NH2
IRIXQLLRAIGDAFNXFYAHH

SEQ ID NO: 939 - protein, 21 aa, Artificial Sequence
  Description of Artificial Sequence: Synthetic peptide
  N-term Ac
  MOD_RES (4)..(4): 2-aminoisobutyric acid
  MOD_RES (9)..(9): Alpha-Me S5-pentenyl-alanine olefin amino acid connected by an all-carbon crosslinker comprising one double bond
  MISC_FEATURE (9)..(13): Crosslink between residues
  MOD_RES (13)..(13): Alpha-Me S5-pentenyl-alanine olefin amino acid connected by an all-carbon crosslinker comprising one double bond
  MOD_RES (16)..(16): 2-aminoisobutyric acid
  C-term NH2
ISIXQLLRAIGDAFNXFYAHH

SEQ ID NO: 940 - protein, 21 aa, Artificial Sequence
  Description of Artificial Sequence: Synthetic peptide
  N-term Ac
  MOD_RES (5)..(5): Alpha-Me R5-pentenyl-alanine olefin amino acid connected by an all-carbon crosslinker comprising one double bond
  MISC_FEATURE (5)..(9): Crosslink between residues
  MOD_RES (9)..(9): Two pentenyl-alanine olefin side chains, each of which is crosslinked to another amino acid as indicated
  MISC_FEATURE (9)..(13): Crosslink between residues
  MOD_RES (13)..(13): Alpha-Me S5-pentenyl-alanine olefin amino acid connected by an all-carbon crosslinker comprising one double bond
  C-term NH2
IWIAAALDAIGRAFNAYYARR

SEQ ID NO: 941 - protein, 20 aa, Artificial Sequence
  Description of Artificial Sequence: Synthetic peptide
  N-term Pr
  MOD_RES (3)..(3): 2-aminoisobutyric acid
  MOD_RES (8)..(8): Alpha-Me S5-pentenyl-alanine olefin amino acid connected by an all-carbon crosslinker comprising one double bond
  MISC_FEATURE (8)..(12): Crosslink between residues
  MOD_RES (12)..(12): Alpha-Me S5-pentenyl-alanine olefin amino acid connected by an all-carbon crosslinker comprising one double bond
  MOD_RES (15)..(15): 2-aminoisobutyric acid
  MOD_RES (18)..(18): 2-aminoisobutyric acid
  C-term NH2
WIXQLLRAIGDAFNXFYXHH

SEQ ID NO: 942 - protein, 21 aa, Artificial Sequence
  Description of Artificial Sequence: Synthetic peptide
  N-term Ac
  MOD_RES (4)..(4): 2-aminoisobutyric acid
  MOD_RES (9)..(9): Alpha-Me S5-pentenyl-alanine olefin amino acid connected by an all-carbon crosslinker comprising one double bond
  MISC_FEATURE (9)..(13): Crosslink between residues
  MOD_RES (13)..(13): Alpha-Me S5-pentenyl-alanine olefin amino acid connected by an all-carbon crosslinker comprising one double bond
  MOD_RES (16)..(16): 2-aminoisobutyric acid
  MOD_RES (19)..(19): 2-aminoisobutyric acid
  C-term NH2
IWIXQLLRAIGDAVNXFYXHH

SEQ ID NO: 943 - protein, 20 aa, Artificial Sequence
  Description of Artificial Sequence: Synthetic peptide
  N-term Pr
  MOD_RES (8)..(8): Alpha-Me S5-pentenyl-alanine olefin amino acid connected by an all-carbon crosslinker comprising one double bond
  MISC_FEATURE (8)..(12): Crosslink between residues
  MOD_RES (12)..(12): Alpha-Me S5-pentenyl-alanine olefin amino acid connected by an all-carbon crosslinker comprising one double bond
  MOD_RES (15)..(15): 2-aminoisobutyric acid
  MOD_RES (18)..(18): 2-aminoisobutyric acid
  C-term NH2
WIAQLLRAIGDAVNXFYXHH

SEQ ID NO: 944 - protein, 20 aa, Artificial Sequence
  Description of Artificial Sequence: Synthetic peptide
  N-term Pr
  MOD_RES (3)..(3): 2-aminoisobutyric acid
  MOD_RES (8)..(8): Alpha-Me S5-pentenyl-alanine olefin amino acid connected by an all-carbon crosslinker comprising one double bond
  MISC_FEATURE (8)..(12): Crosslink between residues
  MOD_RES (12)..(12): Alpha-Me S5-pentenyl-alanine olefin amino acid connected by an all-carbon crosslinker comprising one double bond
  MOD_RES (15)..(15): 2-aminoisobutyric acid
  MOD_RES (18)..(18): 2-aminoisobutyric acid
  C-term NH2
WIXQALRAIGDAFNXFYXHH

SEQ ID NO: 945 - protein, 21 aa, Artificial Sequence
  Description of Artificial Sequence: Synthetic peptide
  N-term Ac
  MOD_RES (4)..(4): 2-aminoisobutyric acid
  MOD_RES (9)..(9): Alpha-Me S5-pentenyl-alanine olefin amino acid connected by an all-carbon crosslinker comprising one double bond
  MISC_FEATURE (9)..(13): Crosslink between residues
  MOD_RES (13)..(13): Alpha-Me S5-pentenyl-alanine olefin amino acid connected by an all-carbon crosslinker comprising one double bond
  MOD_RES (16)..(16): 2-aminoisobutyric acid
  MOD_RES (19)..(19): 2-aminoisobutyric acid
  C-term NH2
IWIXQALRAIGDAVNXFYXHH

SEQ ID NO: 946 - protein, 21 aa, Artificial Sequence
  Description of Artificial Sequence: Synthetic peptide
  N-term Ac
  MOD_RES (4)..(4): 2-aminoisobutyric acid
  MOD_RES (9)..(9): Alpha-Me S5-pentenyl-alanine olefin amino acid connected by an all-carbon crosslinker comprising one double bond
  MISC_FEATURE (9)..(13): Crosslink between residues
  MOD_RES (13)..(13): Alpha-Me S5-pentenyl-alanine olefin amino acid connected by an all-carbon crosslinker comprising one double bond
  MOD_RES (16)..(16): 2-aminoisobutyric acid
  MOD_RES (19)..(19): 2-aminoisobutyric acid
  C-term NH2
RWIXQALRAIGDAVNXFYXHH

SEQ ID NO: 947 - protein, 21 aa, Artificial Sequence
  Description of Artificial Sequence: Synthetic peptide
  N-term Ac
  MOD_RES (6)..(6): 2-aminoisobutyric acid
  MOD_RES (9)..(9): Alpha-Me S5-pentenyl-alanine olefin amino acid connected by an all-carbon crosslinker comprising one double bond
  MISC_FEATURE (9)..(13): Crosslink between residues
  MOD_RES (13)..(13): Alpha-Me S5-pentenyl-alanine olefin amino acid connected by an all-carbon crosslinker comprising one double bond
  MOD_RES (16)..(16): 2-aminoisobutyric acid
  MOD_RES (19)..(19): 2-aminoisobutyric acid
  C-term NH2
IWIAQXLRAIGDAFNXFYXHH

SEQ ID NO: 948 - protein, 21 aa, Artificial Sequence
  Description of Artificial Sequence: Synthetic peptide
  N-term Ac
  MOD_RES (6)..(6): 2-aminoisobutyric acid
  MOD_RES (9)..(9): Alpha-Me S5-pentenyl-alanine olefin amino acid connected by an all-carbon crosslinker comprising one double bond
  MISC_FEATURE (9)..(13): Crosslink between residues
  MOD_RES (13)..(13): Alpha-Me S5-pentenyl-alanine olefin amino acid connected by an all-carbon crosslinker comprising one double bond
  MOD_RES (16)..(16): 2-aminoisobutyric acid
  MOD_RES (19)..(19): 2-aminoisobutyric acid
  C-term NH2
IWIAQXLRAIGDAVNXFYXHH

SEQ ID NO: 949 - protein, 21 aa, Artificial Sequence
  Description of Artificial Sequence: Synthetic peptide
  N-term Ac
  MOD_RES (6)..(6): 2-aminoisobutyric acid
  MOD_RES (9)..(9): Alpha-Me S5-pentenyl-alanine olefin amino acid connected by an all-carbon crosslinker comprising one double bond
  MISC_FEATURE (9)..(13): Crosslink between residues
  MOD_RES (13)..(13): Alpha-Me S5-pentenyl-alanine olefin amino acid connected by an all-carbon crosslinker comprising one double bond
  MOD_RES (16)..(16): 2-aminoisobutyric acid
  MOD_RES (19)..(19): 2-aminoisobutyric acid
  C-term NH2
RWIAQXLRAIGDAVNXFYXHH

SEQ ID NO: 950 - protein, 21 aa, Artificial Sequence
  Description of Artificial Sequence: Synthetic peptide
  N-term Ac
  MOD_RES (9)..(9): Alpha-Me S5-pentenyl-alanine olefin amino acid connected by an all-carbon crosslinker comprising one double bond
  MISC_FEATURE (9)..(13): Crosslink between residues
  MOD_RES (13)..(13): Alpha-Me S5-pentenyl-alanine olefin amino acid connected by an all-carbon crosslinker comprising one double bond
  MOD_RES (16)..(16): 2-aminoisobutyric acid
  MOD_RES (19)..(19): 2-aminoisobutyric acid
  C-term NH2
IWIAQALRAIGDAVNXFYXHH

SEQ ID NO: 951 - protein, 15 aa, Artificial Sequence
  Description of Artificial Sequence: Synthetic peptide
  N-term FITC
  MOD_RES (1)..(1): Beta-Ala
  MOD_RES (10)..(10): Alpha-Me S5-pentenyl-alanine olefin amino acid connected by an all-carbon crosslinker comprising one double bond
  MISC_FEATURE (10)..(14): Crosslink between residues
  MOD_RES (14)..(14): Alpha-Me S5-pentenyl-alanine olefin amino acid connected by an all-carbon crosslinker comprising one double bond
AIWIAQELRAIGDAF

SEQ ID NO: 952 - protein, 20 aa, Artificial Sequence
  Description of Artificial Sequence: Synthetic peptide
  N-term Ac
  MOD_RES (2)..(2): Alpha-Me S5-pentenyl-alanine olefin amino acid connected by an all-carbon crosslinker comprising one double bond
  MISC_FEATURE (2)..(6): Crosslink between residues
  MOD_RES (6)..(6): Alpha-Me S5-pentenyl-alanine olefin amino acid connected by an all-carbon crosslinker comprising one double bond
  MOD_RES (15)..(15): Alpha-Me S5-pentenyl-alanine olefin amino acid connected by an all-carbon crosslinker comprising one double bond
  MISC_FEATURE (15)..(19): Crosslink between residues
  MOD_RES (19)..(19): Alpha-Me S5-pentenyl-alanine olefin amino acid connected by an all-carbon crosslinker comprising one double bond
  C-term NH2
IAIAQALRRIGDEFAAYYAR

SEQ ID NO: 953 - protein, 20 aa, Artificial Sequence
  Description of Artificial Sequence: Synthetic peptide
  N-term Ac
  MOD_RES (2)..(2): Alpha-Me S5-pentenyl-alanine olefin amino acid connected by an all-carbon crosslinker comprising one double bond
  MISC_FEATURE (2)..(6): Crosslink between residues
  MOD_RES (6)..(6): Alpha-Me S5-pentenyl-alanine olefin amino acid connected by an all-carbon crosslinker comprising one double bond
  MOD_RES (9)..(9): Norleucine
  MOD_RES (13)..(13): Norleucine
  MOD_RES (15)..(15): Alpha-Me S5-pentenyl-alanine olefin amino acid connected by an all-carbon crosslinker comprising one double bond
  MISC_FEATURE (15)..(19): Crosslink between residues
  MOD_RES (19)..(19): Alpha-Me S5-pentenyl-alanine olefin amino acid connected by an all-carbon crosslinker comprising one double bond
  C-term NH2
IAIAQALRLIGDLFAAYYAR

SEQ ID NO: 954 - protein, 21 aa, Artificial Sequence
  Description of Artificial Sequence: Synthetic peptide
  N-term Ac
  MOD_RES (2)..(2): Alpha-Me S5-pentenyl-alanine olefin amino acid connected by an all-carbon crosslinker comprising one double bond
  MISC_FEATURE (2)..(6): Crosslink between residues
  MOD_RES (6)..(6): Alpha-Me S5-pentenyl-alanine olefin amino acid connected by an all-carbon crosslinker comprising one double bond
  MOD_RES (15)..(15): Alpha-Me S5-pentenyl-alanine olefin amino acid connected by an all-carbon crosslinker comprising one double bond
  MISC_FEATURE (15)..(19): Crosslink between residues
  MOD_RES (19)..(19): Alpha-Me S5-pentenyl-alanine olefin amino acid connected by an all-carbon crosslinker comprising one double bond
  C-term NH2
IAIAQALRRIGDEFAAYYAHH

SEQ ID NO: 955 - protein, 21 aa, Artificial Sequence
  Description of Artificial Sequence: Synthetic peptide
  N-term Ac
  MOD_RES (2)..(2): Alpha-Me S5-pentenyl-alanine olefin amino acid connected by an all-carbon crosslinker comprising one double bond
  MISC_FEATURE (2)..(6): Crosslink between residues
  MOD_RES (6)..(6): Alpha-Me S5-pentenyl-alanine olefin amino acid connected by an all-carbon crosslinker comprising one double bond
  MOD_RES (9)..(9): Norleucine
  MOD_RES (13)..(13): Norleucine
  MOD_RES (15)..(15): Alpha-Me S5-pentenyl-alanine olefin amino acid connected by an all-carbon crosslinker comprising one double bond
  MISC_FEATURE (15)..(19): Crosslink between residues
  MOD_RES (19)..(19): Alpha-Me S5-pentenyl-alanine olefin amino acid connected by an all-carbon crosslinker comprising one double bond
  C-term NH2
IAIAQALRLIGDLFAAYYAHH

SEQ ID NO: 956 - protein, 21 aa, Artificial Sequence
  Description of Artificial Sequence: Synthetic peptide
  N-term Ac
  MOD_RES (5)..(5): Alpha-Me S5-pentenyl-alanine olefin amino acid connected by an all-carbon crosslinker comprising one double bond
  MISC_FEATURE (5)..(9): Crosslink between residues
  MOD_RES (9)..(9): Alpha-Me S5-pentenyl-alanine olefin amino acid connected by an all-carbon crosslinker comprising one double bond
  MOD_RES (13)..(13): Alpha-Me S5-pentenyl-alanine olefin amino acid connected by an all-carbon crosslinker comprising one double bond
  MISC_FEATURE (13)..(17): Crosslink between residues
  MOD_RES (17)..(17): Alpha-Me S5-pentenyl-alanine olefin amino acid connected by an all-carbon crosslinker comprising one double bond
  C-term NH2
IWIAAALRAIGDAFNAAYARR

SEQ ID NO: 957 - protein, 21 aa, Artificial Sequence
  Description of Artificial Sequence: Synthetic peptide
  N-term Ac
  MOD_RES (5)..(5): Alpha-Me S5-pentenyl-alanine olefin amino acid connected by an all-carbon crosslinker comprising one double bond
  MISC_FEATURE (5)..(9): Crosslink between residues
  MOD_RES (9)..(9): Alpha-Me S5-pentenyl-alanine olefin amino acid connected by an all-carbon crosslinker comprising one double bond
  MOD_RES (13)..(13): Alpha-Me S5-pentenyl-alanine olefin amino acid connected by an all-carbon crosslinker comprising one double bond
  MISC_FEATURE (13)..(17): Crosslink between residues
  MOD_RES (17)..(17): Alpha-Me S5-pentenyl-alanine olefin amino acid connected by an all-carbon crosslinker comprising one double bond
  C-term NH2
IWIAAALRAIGDAFNAAYAHH

SEQ ID NO: 958 - protein, 20 aa, Artificial Sequence
  Description of Artificial Sequence: Synthetic peptide
  N-term Ac
  MOD_RES (5)..(5): Alpha-Me S5-pentenyl-alanine olefin amino acid connected by an all-carbon crosslinker comprising one double bond
  MISC_FEATURE (5)..(9): Crosslink between residues
  MOD_RES (9)..(9): Alpha-Me S5-pentenyl-alanine olefin amino acid connected by an all-carbon crosslinker comprising one double bond
  MOD_RES (13)..(13): Alpha-Me S5-pentenyl-alanine olefin amino acid connected by an all-carbon crosslinker comprising one double bond
  MISC_FEATURE (13)..(17): Crosslink between residues
  MOD_RES (17)..(17): Alpha-Me S5-pentenyl-alanine olefin amino acid connected by an all-carbon crosslinker comprising one double bond
  C-term NH2
IWIAAALRAIGDAFNAAYAR

SEQ ID NO: 959 - protein, 20 aa, Artificial Sequence
  Description of Artificial Sequence: Synthetic peptide
  N-term Ac
  MOD_RES (6)..(6): Alpha-Me S5-pentenyl-alanine olefin amino acid connected by an all-carbon crosslinker comprising one double bond
  MISC_FEATURE (6)..(10): Crosslink between residues
  MOD_RES (10)..(10): Alpha-Me S5-pentenyl-alanine olefin amino acid connected by an all-carbon crosslinker comprising one double bond
  C-term NH2
IWIAQALRAAGDAFNAYYAR

SEQ ID NO: 960 - protein, 21 aa, Artificial Sequence
  Description of Artificial Sequence: Synthetic peptide
  N-term Ac
  MOD_RES (6)..(6): Alpha-Me S5-pentenyl-alanine olefin amino acid connected by an all-carbon crosslinker comprising one double bond
  MISC_FEATURE (6)..(10): Crosslink between residues
  MOD_RES (10)..(10): Alpha-Me S5-pentenyl-alanine olefin amino acid connected by an all-carbon crosslinker comprising one double bond
  C-term NH2
IWIAQALRAAGDAFNAYYAHH

SEQ ID NO: 961 - protein, 21 aa, Artificial Sequence
  Description of Artificial Sequence: Synthetic peptide
  N-term Ac
  MOD_RES (9)..(9): Alpha-Me R8-octenyl-alanine olefin amino acid connected by an all-carbon crosslinker comprising one double bond
  MISC_FEATURE (9)..(16): Crosslink between residues
  MOD_RES (16)..(16): Alpha-Me S5-pentenyl-alanine olefin amino acid connected by an all-carbon crosslinker comprising one double bond
  C-term NH2
IWIAQALRAIGDAFNAYYARR

SEQ ID NO: 962 - protein, 21 aa, Artificial Sequence
  Description of Artificial Sequence: Synthetic peptide
  N-term Ac
  MOD_RES (9)..(9): Alpha-Me R8-octenyl-alanine olefin amino acid connected by an all-carbon crosslinker comprising one double bond
  MISC_FEATURE (9)..(16): Crosslink between residues
  MOD_RES (13)..(13): Norleucine
  MOD_RES (16)..(16): Alpha-Me S5-pentenyl-alanine olefin amino acid connected by an all-carbon crosslinker comprising one double bond
  C-term NH2
IWIAQALRAIGDLFNAYYARR

SEQ ID NO: 963 - protein, 21 aa, Artificial Sequence
  Description of Artificial Sequence: Synthetic peptide
  N-term Ac
  MOD_RES (9)..(9): Alpha-Me R8-octenyl-alanine olefin amino acid connected by an all-carbon crosslinker comprising one double bond
  MISC_FEATURE (9)..(16): Crosslink between residues
  MOD_RES (13)..(13): 2-aminoisobutyric acid
  MOD_RES (16)..(16): Alpha-Me S5-pentenyl-alanine olefin amino acid connected by an all-carbon crosslinker comprising one double bond
  C-term NH2
IWIAQALRAIGDXFNAYYARR

SEQ ID NO: 964 - protein, 21 aa, Artificial Sequence
  Description of Artificial Sequence: Synthetic peptide
  N-term Ac
  MOD_RES (9)..(9): Alpha-Me R8-octenyl-alanine olefin amino acid connected by an all-carbon crosslinker comprising one double bond
  MISC_FEATURE (9)..(16): Crosslink between residues
  MOD_RES (16)..(16): Alpha-Me S5-pentenyl-alanine olefin amino acid connected by an all-carbon crosslinker comprising one double bond
  C-term NH2
IWIAQALRAIGDAFNAYYAHH

SEQ ID NO: 965 - protein, 21 aa, Artificial Sequence
  Description of Artificial Sequence: Synthetic peptide
  N-term Ac
  MOD_RES (9)..(9): Alpha-Me R8-octenyl-alanine olefin amino acid connected by an all-carbon crosslinker comprising one double bond
  MISC_FEATURE (9)..(16): Crosslink between residues
  MOD_RES (13)..(13): Norleucine
  MOD_RES (16)..(16): Alpha-Me S5-pentenyl-alanine olefin amino acid connected by an all-carbon crosslinker comprising one double bond
  C-term NH2
IWIAQALRAIGDLFNAYYAHH

SEQ ID NO: 966 - protein, 21 aa, Artificial Sequence
  Description of Artificial Sequence: Synthetic peptide
  N-term Ac
  MOD_RES (9)..(9): Alpha-Me R8-octenyl-alanine olefin amino acid connected by an all-carbon crosslinker comprising one double bond
  MISC_FEATURE (9)..(16): Crosslink between residues
  MOD_RES (13)..(13): 2-aminoisobutyric acid
  MOD_RES (16)..(16): Alpha-Me S5-pentenyl-alanine olefin amino acid connected by an all-carbon crosslinker comprising one double bond
  C-term NH2
IWIAQALRAIGDXFNAYYAHH

SEQ ID NO: 967 - protein, 20 aa, Artificial Sequence
  Description of Artificial Sequence: Synthetic peptide
  N-term Ac
  MOD_RES (9)..(9): Alpha-Me R8-octenyl-alanine olefin amino acid connected by an all-carbon crosslinker comprising one double bond
  MISC_FEATURE (9)..(16): Crosslink between residues
  MOD_RES (16)..(16): Alpha-Me S5-pentenyl-alanine olefin amino acid connected by an all-carbon crosslinker comprising one double bond
  C-term NH2
IWIAQALRAIGDAFNAYYAR

SEQ ID NO: 968 - protein, 21 aa, Artificial Sequence
  Description of Artificial Sequence: Synthetic peptide
  N-term Ac
  MOD_RES (2)..(2): Cou
  MOD_RES (9)..(9): Alpha-Me S5-pentenyl-alanine olefin amino acid connected by an all-carbon crosslinker comprising one double bond
  MISC_FEATURE (9)..(13): Crosslink between residues
  MOD_RES (13)..(13): Alpha-Me S5-pentenyl-alanine olefin amino acid connected by an all-carbon crosslinker comprising one double bond
  MOD_RES (16)..(16): 2-aminoisobutyric acid
  C-term NH2
IXIAQQLRAIGDAFNXFYAHH

SEQ ID NO: 969 - protein, 21 aa, Artificial Sequence
  Description of Artificial Sequence: Synthetic peptide
  N-term Ac
  MOD_RES (2)..(2): Cou
  MOD_RES (9)..(9): Alpha-Me S5-pentenyl-alanine olefin amino acid connected by an all-carbon crosslinker comprising one double bond
  MISC_FEATURE (9)..(13): Crosslink between residues
  MOD_RES (13)..(13): Alpha-Me S5-pentenyl-alanine olefin amino acid connected by an all-carbon crosslinker comprising one double bond
  MOD_RES (16)..(16): 2-aminoisobutyric acid
  C-term NH2
IXIAQALRAIGDAFNXFYAHH

SEQ ID NO: 970 - protein, 21 aa, Artificial Sequence
  Description of Artificial Sequence: Synthetic peptide
  N-term Ac
  MOD_RES (2)..(2): Cou
  MOD_RES (9)..(9): Alpha-Me S5-pentenyl-alanine olefin amino acid connected by an all-carbon crosslinker comprising one double bond
  MISC_FEATURE (9)..(13): Crosslink between residues
  MOD_RES (13)..(13): Alpha-Me S5-pentenyl-alanine olefin amino acid connected by an all-carbon crosslinker comprising one double bond
  MOD_RES (16)..(16): 2-aminoisobutyric acid
  C-term NH2
IXIAQELRAIGDAFNXFYAHH

SEQ ID NO: 971 - protein, 21 aa, Artificial Sequence
  Description of Artificial Sequence: Synthetic peptide
  N-term Ac
  MOD_RES (2)..(2): Cou
  MOD_RES (9)..(9): Alpha-Me S5-pentenyl-alanine olefin amino acid connected by an all-carbon crosslinker comprising one double bond
  MISC_FEATURE (9)..(13): Crosslink between residues
  MOD_RES (13)..(13): Alpha-Me S5-pentenyl-alanine olefin amino acid connected by an all-carbon crosslinker comprising one double bond
  MOD_RES (16)..(16): 2-aminoisobutyric acid
  C-term NH2
IXIAQALDAIGRAFNXFYAHH

SEQ ID NO: 972 - protein, 21 aa, Artificial Sequence
  Description of Artificial Sequence: Synthetic peptide
  N-term Ac
  MOD_RES (2)..(2): Cou
  MOD_RES (9)..(9): Alpha-Me S5-pentenyl-alanine olefin amino acid connected by an all-carbon crosslinker comprising one double bond
  MISC_FEATURE (9)..(13): Crosslink between residues
  MOD_RES (13)..(13): Alpha-Me S5-pentenyl-alanine olefin amino acid connected by an all-carbon crosslinker comprising one double bond
  MOD_RES (16)..(16): 2-aminoisobutyric acid
  C-term NH2
IXIAQALRAIGDAFNXFYAAA

SEQ ID NO: 973 - protein, 19 aa, Artificial Sequence
  Description of Artificial Sequence: Synthetic peptide
  N-term Ac
  MOD_RES (2)..(2): Cou
  MOD_RES (9)..(9): Alpha-Me S5-pentenyl-alanine olefin amino acid connected by an all-carbon crosslinker comprising one double bond
  MISC_FEATURE (9)..(13): Crosslink between residues
  MOD_RES (13)..(13): Alpha-Me S5-pentenyl-alanine olefin amino acid connected by an all-carbon crosslinker comprising one double bond
  MOD_RES (16)..(16): 2-aminoisobutyric acid
  C-term NH2
IXIAQALRAIGDAFNXFYA

SEQ ID NO: 974 - protein, 21 aa, Artificial Sequence
  Description of Artificial Sequence: Synthetic peptide
  N-term Ac
  MOD_RES (2)..(2): (S)-2-amino-3-(7-(diethylamino)-2-oxo-2H-chromene-3- carboxamido)propanoic acid
  MOD_RES (9)..(9): Alpha-Me R5-pentenyl-alanine olefin amino acid connected by an all-carbon crosslinker comprising one double bond
  MISC_FEATURE (9)..(13): Crosslink between residues
  MOD_RES (13)..(13): Two pentenyl-alanine olefin side chains, each of which is crosslinked to another amino acid as indicated
  MISC_FEATURE (13)..(17): Crosslink between residues
  MOD_RES (17)..(17): Alpha-Me S5-pentenyl-alanine olefin amino acid connected by an all-carbon crosslinker comprising one double bond
  C-term NH2
RXIAQALRAIGDAFNAAYAHH

SEQ ID NO: 975 - protein, 21 aa, Artificial Sequence
  Description of Artificial Sequence: Synthetic peptide
  N-term Ac
  MOD_RES (2)..(2): (S)-2-amino-3-(7-(diethylamino)-2-oxo-2H-chromene-3- carboxamido)propanoic acid
  MOD_RES (9)..(9): Alpha-Me R5-pentenyl-alanine olefin amino acid connected by an all-carbon crosslinker comprising one double bond
  MISC_FEATURE (9)..(13): Crosslink between residues
  MOD_RES (13)..(13): Two pentenyl-alanine olefin side chains, each of which is crosslinked to another amino acid as indicated
  MISC_FEATURE (13)..(17): Crosslink between residues
  MOD_RES (17)..(17): Alpha-Me S5-pentenyl-alanine olefin amino acid connected by an all-carbon crosslinker comprising one double bond
  C-term NH2
RXIAQQLRAIGDAFNAAYAHH

SEQ ID NO: 976 - protein, 21 aa, Artificial Sequence
  Description of Artificial Sequence: Synthetic peptide
  N-term Ac
  MOD_RES (2)..(2): (S)-2-amino-3-(7-(diethylamino)-2-oxo-2H-chromene-3- carboxamido)propanoic acid
  MOD_RES (9)..(9): Alpha-Me S5-pentenyl-alanine olefin amino acid connected by an all-carbon crosslinker comprising one double bond
  MISC_FEATURE (9)..(13): Crosslink between residues
  MOD_RES (13)..(13): Alpha-Me S5-pentenyl-alanine olefin amino acid connected by an all-carbon crosslinker comprising one double bond
  MOD_RES (16)..(16): 2-aminoisobutyric acid
  C-term NH2
RXIAQALRAIGDALNXFYAHH

SEQ ID NO: 977 - protein, 21 aa, Artificial Sequence
  Description of Artificial Sequence: Synthetic peptide
  N-term Ac
  MOD_RES (2)..(2): (S)-2-amino-3-(7-(diethylamino)-2-oxo-2H-chromene-3- carboxamido)propanoic acid
  MOD_RES (9)..(9): Alpha-Me S5-pentenyl-alanine olefin amino acid connected by an all-carbon crosslinker comprising one double bond
  MISC_FEATURE (9)..(13): Crosslink between residues
  MOD_RES (13)..(13): Alpha-Me S5-pentenyl-alanine olefin amino acid connected by an all-carbon crosslinker comprising one double bond
  MOD_RES (16)..(16): 2-aminoisobutyric acid
  C-term NH2
IXIAQALRAIGDAFNXFYAHH

SEQ ID NO: 978 - protein, 21 aa, Artificial Sequence
  Description of Artificial Sequence: Synthetic peptide
  N-term Ac
  MOD_RES (2)..(2): (S)-2-amino-3-(7-(diethylamino)-2-oxo-2H-chromene-3- carboxamido)propanoic acid
  MOD_RES (9)..(9): Alpha-Me S5-pentenyl-alanine olefin amino acid connected by an all-carbon crosslinker comprising one double bond
  MISC_FEATURE (9)..(13): Crosslink between residues
  MOD_RES (13)..(13): Alpha-Me S5-pentenyl-alanine olefin amino acid connected by an all-carbon crosslinker comprising one double bond
  MOD_RES (16)..(16): 2-aminoisobutyric acid
  C-term NH2
IXIAQQLRAIGDAFNXFYAHH

SEQ ID NO: 979 - protein, 21 aa, Artificial Sequence
  Description of Artificial Sequence: Synthetic peptide
  N-term Ac
  MOD_RES (9)..(9): Alpha-Me R-azide 1,5 triazole (3 carbon) amino acid
  MISC_FEATURE (9)..(13): Crosslink between residues
  MOD_RES (13)..(13): 2-amino-2-(pent-4-yn-1-yl)hept-6-ynoic acid after Ru-catalyzed cycloaddition
  MISC_FEATURE (13)..(17): Crosslink between residues
  MOD_RES (17)..(17): Alpha-Me azide 1,5 triazole (3 carbon) amino acid
  C-term NH2
RWIAQALRXIGDXFNAXYAHH

SEQ ID NO: 980 - protein, 21 aa, Artificial Sequence
  Description of Artificial Sequence: Synthetic peptide
  N-term Ac
  MOD_RES (2)..(2): (S)-2-amino-3-(11-oxo-2,3,6,7-tetrahydro-1H,5H,11H-pyrano [2,3-f]pyrido[3,2,1-ij]quinoline-10-carboxamido)propanoic acid
  MOD_RES (9)..(9): Alpha-Me R5-pentenyl-alanine olefin amino acid connected by an all-carbon crosslinker comprising one double bond
  MISC_FEATURE (9)..(13): Crosslink between residues
  MOD_RES (13)..(13): Two pentenyl-alanine olefin side chains, each of which is crosslinked to another amino acid as indicated
  MISC_FEATURE (13)..(17): Crosslink between residues
  MOD_RES (17)..(17): Alpha-Me S5-pentenyl-alanine olefin amino acid connected by an all-carbon crosslinker comprising one double bond
  C-term NH2
RXIAQALRAIGDAFNAAYAHH

SEQ ID NO: 981 - protein, 21 aa, Artificial Sequence
  Description of Artificial Sequence: Synthetic peptide
  N-term Ac
  MOD_RES (2)..(2): (S)-2-amino-3-(11-oxo-2,3,6,7-tetrahydro-1H,5H,11H-pyrano [2,3-f]pyrido[3,2,1-ij]quinoline-10-carboxamido)propanoic acid
  MOD_RES (9)..(9): Alpha-Me R5-pentenyl-alanine olefin amino acid connected by an all-carbon crosslinker comprising one double bond
  MISC_FEATURE (9)..(13): Crosslink between residues
  MOD_RES (13)..(13): Two pentenyl-alanine olefin side chains, each of which is crosslinked to another amino acid as indicated
  MISC_FEATURE (13)..(17): Crosslink between residues
  MOD_RES (17)..(17): Alpha-Me S5-pentenyl-alanine olefin amino acid connected by an all-carbon crosslinker comprising one double bond
  C-term NH2
RXIAQQLRAIGDAFNAAYAHH

SEQ ID NO: 982 - protein, 21 aa, Artificial Sequence
  Description of Artificial Sequence: Synthetic peptide
  N-term Ac
  MOD_RES (2)..(2): (S)-2-amino-3-(11-oxo-2,3,6,7-tetrahydro-1H,5H,11H-pyrano [2,3-f]pyrido[3,2,1-ij]quinoline-10-carboxamido)propanoic acid
  MOD_RES (9)..(9): Alpha-Me S5-pentenyl-alanine olefin amino acid connected by an all-carbon crosslinker comprising one double bond
  MISC_FEATURE (9)..(13): Crosslink between residues
  MOD_RES (13)..(13): Alpha-Me S5-pentenyl-alanine olefin amino acid connected by an all-carbon crosslinker comprising one double bond
  MOD_RES (16)..(16): 2-aminoisobutyric acid
  C-term NH2
RXIAQALRAIGDALNXFYAHH

SEQ ID NO: 983 - protein, 21 aa, Artificial Sequence
  Description of Artificial Sequence: Synthetic peptide
  N-term Ac
  MOD_RES (2)..(2): (S)-2-amino-3-(11-oxo-2,3,6,7-tetrahydro-1H,5H,11H-pyrano [2,3-f]pyrido[3,2,1-ij]quinoline-10-carboxamido)propanoic acid
  MOD_RES (9)..(9): Alpha-Me S5-pentenyl-alanine olefin amino acid connected by an all-carbon crosslinker comprising one double bond
  MISC_FEATURE (9)..(13): Crosslink between residues
  MOD_RES (13)..(13): Alpha-Me S5-pentenyl-alanine olefin amino acid connected by an all-carbon crosslinker comprising one double bond
  MOD_RES (16)..(16): 2-aminoisobutyric acid
  C-term NH2
IXIAQALRAIGDAFNXFYAHH

SEQ ID NO: 984 - protein, 21 aa, Artificial Sequence
  Description of Artificial Sequence: Synthetic peptide
  N-term Ac
  MOD_RES (2)..(2): (S)-2-amino-3-(11-oxo-2,3,6,7-tetrahydro-1H,5H,11H-pyrano [2,3-f]pyrido[3,2,1-ij]quinoline-10-carboxamido)propanoic acid
  MOD_RES (9)..(9): Alpha-Me S5-pentenyl-alanine olefin amino acid connected by an all-carbon crosslinker comprising one double bond
  MISC_FEATURE (9)..(13): Crosslink between residues
  MOD_RES (13)..(13): Alpha-Me S5-pentenyl-alanine olefin amino acid connected by an all-carbon crosslinker comprising one double bond
  MOD_RES (16)..(16): 2-aminoisobutyric acid
  C-term NH2
IXIAQQLRAIGDAFNXFYAHH

SEQ ID NO: 985 - protein, 21 aa, Artificial Sequence
  Description of Artificial Sequence: Synthetic peptide
  N-term Ac
  MOD_RES (9)..(9): Alpha-Me S5-pentenyl-alanine olefin amino acid connected by an all-carbon crosslinker comprising one double bond
  MISC_FEATURE (9)..(13): Crosslink between residues
  MOD_RES (13)..(13): Alpha-Me S5-pentenyl-alanine olefin amino acid connected by an all-carbon crosslinker comprising one double bond
  MOD_RES (16)..(16): 2-aminoisobutyric acid
  C-term NH2
IWIAQALRAIGDAFNXFYAAA

SEQ ID NO: 986 - protein, 21 aa, Artificial Sequence
  Description of Artificial Sequence: Synthetic peptide
  N-term Ac
  MOD_RES (9)..(9): Alpha-Me S5-pentenyl-alanine olefin amino acid connected by an all-carbon crosslinker comprising one double bond
  MISC_FEATURE (9)..(13): Crosslink between residues
  MOD_RES (13)..(13): Alpha-Me S5-pentenyl-alanine olefin amino acid connected by an all-carbon crosslinker comprising one double bond
  MOD_RES (16)..(16): 2-aminoisobutyric acid
  C-term NH2
IWIAQELRAIGDAFNXFYAHH

SEQ ID NO: 987 - protein, 21 aa, Artificial Sequence
  Description of Artificial Sequence: Synthetic peptide
  N-term Ac
  MOD_RES (9)..(9): Alpha-Me R8-octenyl-alanine olefin amino acid connected by an all-carbon crosslinker comprising one double bond
  MISC_FEATURE (9)..(16): Crosslink between residues
  MOD_RES (13)..(13): 2-aminoisobutyric acid
  MOD_RES (16)..(16): Alpha-Me S5-pentenyl-alanine olefin amino acid connected by an all-carbon crosslinker comprising one double bond
  C-term NH2
IWIAQALRAIGAXFNAFYAHH

SEQ ID NO: 988 - protein, 19 aa, Artificial Sequence
  Description of Artificial Sequence: Synthetic peptide
  N-term Ac
  MOD_RES (9)..(9): Alpha-Me S5-pentenyl-alanine olefin amino acid connected by an all-carbon crosslinker comprising one double bond
  MISC_FEATURE (9)..(13): Crosslink between residues
  MOD_RES (13)..(13): Alpha-Me S5-pentenyl-alanine olefin amino acid connected by an all-carbon crosslinker comprising one double bond
  MOD_RES (16)..(16): 2-aminoisobutyric acid
  C-term NH2
IWIAQALRAIGDAFNXFYA

SEQ ID NO: 989 - protein, 21 aa, Artificial Sequence
  Description of Artificial Sequence: Synthetic peptide
  N-term Ac
  MOD_RES (2)..(2): (S)-2-amino-3-(7-(diethylamino)-2-oxo-2H-chromene-3- carboxamido)propanoic acid
  MOD_RES (5)..(5): Alpha-Me S5-pentenyl-alanine olefin amino acid connected by an all-carbon crosslinker comprising one double bond
  MISC_FEATURE (5)..(9): Crosslink between residues
  MOD_RES (9)..(9): Two pentenyl-alanine olefin side chains, each of which is crosslinked to another amino acid as indicated
  MISC_FEATURE (9)..(13): Crosslink between residues
  MOD_RES (13)..(13): Alpha-Me R5-pentenyl-alanine olefin amino acid connected by an all-carbon crosslinker comprising one double bond
  C-term NH2
IXIAAALRAIGDAFNAYYARR

SEQ ID NO: 990 - protein, 21 aa, Artificial Sequence
  Description of Artificial Sequence: Synthetic peptide
  N-term Ac
  MOD_RES (2)..(2): Diaminopropionic acid
  MOD_RES (5)..(5): Alpha-Me S5-pentenyl-alanine olefin amino acid connected by an all-carbon crosslinker comprising one double bond
  MISC_FEATURE (5)..(9): Crosslink between residues
  MOD_RES (9)..(9): Two pentenyl-alanine olefin side chains, each of which is crosslinked to another amino acid as indicated
  MISC_FEATURE (9)..(13): Crosslink between residues
  MOD_RES (13)..(13): Alpha-Me R5-pentenyl-alanine olefin amino acid connected by an all-carbon crosslinker comprising one double bond
  C-term NH2
IXIAAALRAIGDAFNAYYARR

SEQ ID NO: 991 - protein, 21 aa, Artificial Sequence
  Description of Artificial Sequence: Synthetic peptide
  N-term Ac
  MOD_RES (2)..(2): (S)-2-amino-3-(7-(diethylamino)-2-oxo-2H-chromene-3- carboxamido)propanoic acid
  MOD_RES (5)..(5): Alpha-Me S5-pentenyl-alanine olefin amino acid connected by an all-carbon crosslinker comprising one double bond
  MISC_FEATURE (5)..(9): Crosslink between residues
  MOD_RES (9)..(9): Two pentenyl-alanine olefin side chains, each of which is crosslinked to another amino acid as indicated
  MISC_FEATURE (9)..(13): Crosslink between residues
  MOD_RES (13)..(13): Alpha-Me R5-pentenyl-alanine olefin amino acid connected by an all-carbon crosslinker comprising one double bond
  C-term NH2
IXIAAQLRAIGDAFNAYYARR

SEQ ID NO: 992 - protein, 21 aa, Artificial Sequence
  Description of Artificial Sequence: Synthetic peptide
  N-term Ac
  MOD_RES (2)..(2): Diaminopropionic acid
  MOD_RES (5)..(5): Alpha-Me S5-pentenyl-alanine olefin amino acid connected by an all-carbon crosslinker comprising one double bond
  MISC_FEATURE (5)..(9): Crosslink between residues
  MOD_RES (9)..(9): Two pentenyl-alanine olefin side chains, each of which is crosslinked to another amino acid as indicated
  MISC_FEATURE (9)..(13): Crosslink between residues
  MOD_RES (13)..(13): Alpha-Me R5-pentenyl-alanine olefin amino acid connected by an all-carbon crosslinker comprising one double bond
  C-term NH2
IXIAAQLRAIGDAFNAYYARR

SEQ ID NO: 993 - protein, 21 aa, Artificial Sequence
  Description of Artificial Sequence: Synthetic peptide
  N-term Ac
  MOD_RES (9)..(9): Alpha-Me R5-pentenyl-alanine olefin amino acid connected by an all-carbon crosslinker comprising one double bond
  MISC_FEATURE (9)..(13): Crosslink between residues
  MOD_RES (13)..(13): Two pentenyl-alanine olefin side chains, each of which is crosslinked to another amino acid as indicated
  MISC_FEATURE (13)..(17): Crosslink between residues
  MOD_RES (17)..(17): Alpha-Me S5-pentenyl-alanine olefin amino acid connected by an all-carbon crosslinker comprising one double bond
  C-term NH2
IWIAQQLRAIGDAFNAAYAHH

SEQ ID NO: 994 - protein, 21 aa, Artificial Sequence
  Description of Artificial Sequence: Synthetic peptide
  N-term Ac
  MOD_RES (2)..(2): (S)-2-amino-3-(7-(diethylamino)-2-oxo-2H-chromene-3- carboxamido)propanoic acid
  MOD_RES (9)..(9): Alpha-Me R5-pentenyl-alanine olefin amino acid connected by an all-carbon crosslinker comprising one double bond
  MISC_FEATURE (9)..(13): Crosslink between residues
  MOD_RES (13)..(13): Two pentenyl-alanine olefin side chains, each of which is crosslinked to another amino acid as indicated
  MISC_FEATURE (13)..(17): Crosslink between residues
  MOD_RES (17)..(17): Alpha-Me S5-pentenyl-alanine olefin amino acid connected by an all-carbon crosslinker comprising one double bond
  C-term NH2
IXIAQQLRAIGDAFNAAYAHH

SEQ ID NO: 995 - protein, 21 aa, Artificial Sequence
  Description of Artificial Sequence: Synthetic peptide
  N-term Ac
  MOD_RES (2)..(2): Diaminopropionic acid
  MOD_RES (9)..(9): Alpha-Me R5-pentenyl-alanine olefin amino acid connected by an all-carbon crosslinker comprising one double bond
  MISC_FEATURE (9)..(13): Crosslink between residues
  MOD_RES (13)..(13): Two pentenyl-alanine olefin side chains, each of which is crosslinked to another amino acid as indicated
  MISC_FEATURE (13)..(17): Crosslink between residues
  MOD_RES (17)..(17): Alpha-Me S5-pentenyl-alanine olefin amino acid connected by an all-carbon crosslinker comprising one double bond
  C-term NH2
IXIAQQLRAIGDAFNAAYAHH

SEQ ID NO: 996 - protein, 21 aa, Artificial Sequence
  Description of Artificial Sequence: Synthetic peptide
  N-term Ac
  MOD_RES (2)..(2): Diaminopropionic acid
  MOD_RES (9)..(9): Alpha-Me R5-pentenyl-alanine olefin amino acid connected by an all-carbon crosslinker comprising one double bond
  MISC_FEATURE (9)..(13): Crosslink between residues
  MOD_RES (13)..(13): Two pentenyl-alanine olefin side chains, each of which is crosslinked to another amino acid as indicated
  MISC_FEATURE (13)..(17): Crosslink between residues
  MOD_RES (17)..(17): Alpha-Me S5-pentenyl-alanine olefin amino acid connected by an all-carbon crosslinker comprising one double bond
  C-term NH2
RXIAQQLRAIGDAFNAAYAHH

SEQ ID NO: 997 - protein, 21 aa, Artificial Sequence
  Description of Artificial Sequence: Synthetic peptide
  N-term Ac
  MOD_RES (9)..(9): Alpha-Me S5-pentenyl-alanine olefin amino acid connected by an all-carbon crosslinker comprising one double bond
  MISC_FEATURE (9)..(13): Crosslink between residues
  MOD_RES (13)..(13): Alpha-Me S5-pentenyl-alanine olefin amino acid connected by an all-carbon crosslinker comprising one double bond
  MOD_RES (16)..(16): 2-aminoisobutyric acid
  MOD_RES (17)..(17): (S)-2-amino-3-(7-(diethylamino)-2-oxo-2H-chromene-3- carboxamido)propanoic acid
  C-term NH2
IWIAQALRAIGDAFNXXYAHH

SEQ ID NO: 998 - protein, 21 aa, Artificial Sequence
  Description of Artificial Sequence: Synthetic peptide
  N-term Ac
  MOD_RES (9)..(9): Alpha-Me S5-pentenyl-alanine olefin amino acid connected by an all-carbon crosslinker comprising one double bond
  MISC_FEATURE (9)..(13): Crosslink between residues
  MOD_RES (13)..(13): Alpha-Me S5-pentenyl-alanine olefin amino acid connected by an all-carbon crosslinker comprising one double bond
  MOD_RES (16)..(16): 2-aminoisobutyric acid
  MOD_RES (17)..(17): (S)-2-amino-3-(11-oxo-2,3,6,7-tetrahydro-1H,5H,11H-pyrano [2,3-f]pyrido[3,2,1-ij]quinoline-10-carboxamido)propanoic acid
  C-term NH2
IWIAQALRAIGDAFNXXYAHH

SEQ ID NO: 999 - protein, 21 aa, Artificial Sequence
  Description of Artificial Sequence: Synthetic peptide
  N-term Ac
  MOD_RES (9)..(9): Alpha-Me S5-pentenyl-alanine olefin amino acid connected by an all-carbon crosslinker comprising one double bond
  MISC_FEATURE (9)..(13): Crosslink between residues
  MOD_RES (13)..(13): Alpha-Me S5-pentenyl-alanine olefin amino acid connected by an all-carbon crosslinker comprising one double bond
  MOD_RES (16)..(16): 2-aminoisobutyric acid
  MOD_RES (17)..(17): Diaminopropionic acid
  C-term NH2
IWIAQALRAIGDAFNXXYAHH

SEQ ID NO: 1000 - protein, 21 aa, Artificial Sequence
  Description of Artificial Sequence: Synthetic peptide
  N-term Ac
  MOD_RES (9)..(9): Alpha-Me S5-pentenyl-alanine olefin amino acid connected by an all-carbon crosslinker comprising one double bond
  MISC_FEATURE (9)..(13): Crosslink between residues
  MOD_RES (13)..(13): Alpha-Me S5-pentenyl-alanine olefin amino acid connected by an all-carbon crosslinker comprising one double bond
  MOD_RES (16)..(16): 2-aminoisobutyric acid
  MOD_RES (17)..(17): (S)-2-amino-3-(7-(diethylamino)-2-oxo-2H-chromene-3- carboxamido)propanoic acid
  C-term NH2
IRIAQALRAIGDAFNXXYAHH

SEQ ID NO: 1001 - protein, 21 aa, Artificial Sequence
  Description of Artificial Sequence: Synthetic peptide
  N-term Ac
  MOD_RES (9)..(9): Alpha-Me S5-pentenyl-alanine olefin amino acid connected by an all-carbon crosslinker comprising one double bond
  MISC_FEATURE (9)..(13): Crosslink between residues
  MOD_RES (13)..(13): Alpha-Me S5-pentenyl-alanine olefin amino acid connected by an all-carbon crosslinker comprising one double bond
  MOD_RES (16)..(16): 2-aminoisobutyric acid
  MOD_RES (17)..(17): (S)-2-amino-3-(11-oxo-2,3,6,7-tetrahydro-1H,5H,11H-pyrano [2,3-f]pyrido[3,2,1-ij]quinoline-10-carboxamido)propanoic acid
  C-term NH2
IRIAQALRAIGDAFNXXYAHH

SEQ ID NO: 1002 - protein, 21 aa, Artificial Sequence
  Description of Artificial Sequence: Synthetic peptide
  N-term Ac
  MOD_RES (9)..(9): Alpha-Me S5-pentenyl-alanine olefin amino acid connected by an all-carbon crosslinker comprising one double bond
  MISC_FEATURE (9)..(13): Crosslink between residues
  MOD_RES (13)..(13): Alpha-Me S5-pentenyl-alanine olefin amino acid connected by an all-carbon crosslinker comprising one double bond
  MOD_RES (16)..(16): 2-aminoisobutyric acid
  MOD_RES (17)..(17): Diaminopropionic acid
  C-term NH2
IRIAQALRAIGDAFNXXYAHH

SEQ ID NO: 1003 - protein, 21 aa, Artificial Sequence
  Description of Artificial Sequence: Synthetic peptide
  N-term Ac
  MOD_RES (2)..(2): 2-aminoisobutyric acid
  MOD_RES (9)..(9): Alpha-Me S5-pentenyl-alanine olefin amino acid connected by an all-carbon crosslinker comprising one double bond
  MISC_FEATURE (9)..(13): Crosslink between residues
  MOD_RES (13)..(13): Alpha-Me S5-pentenyl-alanine olefin amino acid connected by an all-carbon crosslinker comprising one double bond
  MOD_RES (16)..(16): 2-aminoisobutyric acid
  MOD_RES (17)..(17): (S)-2-amino-3-(7-(diethylamino)-2-oxo-2H-chromene-3- carboxamido)propanoic acid
  C-term NH2
IXIAQALRAIGDAFNXXYAHH

SEQ ID NO: 1004 - protein, 21 aa, Artificial Sequence
  Description of Artificial Sequence: Synthetic peptide
  N-term Ac
  MOD_RES (2)..(2): 2-aminoisobutyric acid
  MOD_RES (9)..(9): Alpha-Me S5-pentenyl-alanine olefin amino acid connected by an all-carbon crosslinker comprising one double bond
  MISC_FEATURE (9)..(13): Crosslink between residues
  MOD_RES (13)..(13): Alpha-Me S5-pentenyl-alanine olefin amino acid connected by an all-carbon crosslinker comprising one double bond
  MOD_RES (16)..(16): 2-aminoisobutyric acid
  MOD_RES (17)..(17): (S)-2-amino-3-(11-oxo-2,3,6,7-tetrahydro-1H,5H,11H-pyrano [2,3-f]pyrido[3,2,1-ij]quinoline-10-carboxamido)propanoic acid
  C-term NH2
IXIAQALRAIGDAFNXXYAHH

SEQ ID NO: 1005 - protein, 21 aa, Artificial Sequence
  Description of Artificial Sequence: Synthetic peptide
  N-term Ac
  MOD_RES (2)..(2): 2-aminoisobutyric acid
  MOD_RES (9)..(9): Alpha-Me S5-pentenyl-alanine olefin amino acid connected by an all-carbon crosslinker comprising one double bond
  MISC_FEATURE (9)..(13): Crosslink between residues
  MOD_RES (13)..(13): Alpha-Me S5-pentenyl-alanine olefin amino acid connected by an all-carbon crosslinker comprising one double bond
  MOD_RES (16)..(16): 2-aminoisobutyric acid
  MOD_RES (17)..(17): Diaminopropionic acid
  C-term NH2
IXIAQALRAIGDAFNXXYAHH

SEQ ID NO: 1006 - protein, 21 aa, Artificial Sequence
  Description of Artificial Sequence: Synthetic peptide
  N-term Ac
  MOD_RES (2)..(2): (S)-2-amino-3-(7-(diethylamino)-2-oxo-2H-chromene-3- carboxamido)propanoic acid
  MOD_RES (9)..(9): Alpha-Me S5-pentenyl-alanine olefin amino acid connected by an all-carbon crosslinker comprising one double bond
  MISC_FEATURE (9)..(13): Crosslink between residues
  MOD_RES (13)..(13): Alpha-Me S5-pentenyl-alanine olefin amino acid connected by an all-carbon crosslinker comprising one double bond
  MOD_RES (16)..(16): 2-aminoisobutyric acid
  C-term NH2
IXIAQALRAIGDAFAXFYAHH

SEQ ID NO: 1007 - protein, 21 aa, Artificial Sequence
  Description of Artificial Sequence: Synthetic peptide
  N-term Ac
  MOD_RES (2)..(2): (S)-2-amino-3-(11-oxo-2,3,6,7-tetrahydro-1H,5H,11H-pyrano [2,3-f]pyrido[3,2,1-ij]quinoline-10-carboxamido)propanoic acid
  MOD_RES (9)..(9): Alpha-Me S5-pentenyl-alanine olefin amino acid connected by an all-carbon crosslinker comprising one double bond
  MISC_FEATURE (9)..(13): Crosslink between residues
  MOD_RES (13)..(13): Alpha-Me S5-pentenyl-alanine olefin amino acid connected by an all-carbon crosslinker comprising one double bond
  MOD_RES (16)..(16): 2-aminoisobutyric acid
  C-term NH2
IXIAQALRAIGDAFAXFYAHH

SEQ ID NO: 1008 - protein, 21 aa, Artificial Sequence
  Description of Artificial Sequence: Synthetic peptide
  N-term Ac
  MOD_RES (2)..(2): Diaminopropionic acid
  MOD_RES (9)..(9): Alpha-Me S5-pentenyl-alanine olefin amino acid connected by an all-carbon crosslinker comprising one double bond
  MISC_FEATURE (9)..(13): Crosslink between residues
  MOD_RES (13)..(13): Alpha-Me S5-pentenyl-alanine olefin amino acid connected by an all-carbon crosslinker comprising one double bond
  MOD_RES (16)..(16): 2-aminoisobutyric acid
  C-term NH2
IXIAQALRAIGDAFAXFYAHH

SEQ ID NO: 1009 - protein, 21 aa, Artificial Sequence
  Description of Artificial Sequence: Synthetic peptide
  N-term Pam
  MOD_RES (9)..(9): Alpha-Me S5-pentenyl-alanine olefin amino acid connected by an all-carbon crosslinker comprising one double bond
  MISC_FEATURE (9)..(13): Crosslink between residues
  MOD_RES (13)..(13): Alpha-Me S5-pentenyl-alanine olefin amino acid connected by an all-carbon crosslinker comprising one double bond
  MOD_RES (16)..(16): 2-aminoisobutyric acid
  C-term NH2
IWIAQALRAIGDAFNXFYAHH

SEQ ID NO: 1010 - protein, 21 aa, Artificial Sequence
  Description of Artificial Sequence: Synthetic peptide
  N-term Pam
  MOD_RES (2)..(2): (S)-2-amino-3-(7-(diethylamino)-2-oxo-2H-chromene-3- carboxamido)propanoic acid
  MOD_RES (9)..(9): Alpha-Me S5-pentenyl-alanine olefin amino acid connected by an all-carbon crosslinker comprising one double bond
  MISC_FEATURE (9)..(13): Crosslink between residues
  MOD_RES (13)..(13): Alpha-Me S5-pentenyl-alanine olefin amino acid connected by an all-carbon crosslinker comprising one double bond
  MOD_RES (16)..(16): 2-aminoisobutyric acid
  C-term NH2
IXIAQALRAIGDAFNXFYAHH

SEQ ID NO: 1011 - protein, 21 aa, Artificial Sequence
  Description of Artificial Sequence: Synthetic peptide
  N-term Pam
  MOD_RES (2)..(2): (S)-2-amino-3-(11-oxo-2,3,6,7-tetrahydro-1H,5H,11H-pyrano [2,3-f]pyrido[3,2,1-ij]quinoline-10-carboxamido)propanoic acid
  MOD_RES (9)..(9): Alpha-Me S5-pentenyl-alanine olefin amino acid connected by an all-carbon crosslinker comprising one double bond
  MISC_FEATURE (9)..(13): Crosslink between residues
  MOD_RES (13)..(13): Alpha-Me S5-pentenyl-alanine olefin amino acid connected by an all-carbon crosslinker comprising one double bond
  MOD_RES (16)..(16): 2-aminoisobutyric acid
  C-term NH2
IXIAQALRAIGDAFNXFYAHH

SEQ ID NO: 1012 - protein, 21 aa, Artificial Sequence
  Description of Artificial Sequence: Synthetic peptide
  N-term Pam
  MOD_RES (2)..(2): Diaminopropionic acid
  MOD_RES (9)..(9): Alpha-Me S5-pentenyl-alanine olefin amino acid connected by an all-carbon crosslinker comprising one double bond
  MISC_FEATURE (9)..(13): Crosslink between residues
  MOD_RES (13)..(13): Alpha-Me S5-pentenyl-alanine olefin amino acid connected by an all-carbon crosslinker comprising one double bond
  MOD_RES (16)..(16): 2-aminoisobutyric acid
  C-term NH2
IXIAQALRAIGDAFNXFYAHH

SEQ ID NO: 1013 - protein, 21 aa, Artificial Sequence
  Description of Artificial Sequence: Synthetic peptide
  N-term Ac
  MOD_RES (9)..(9): Alpha-Me azide 1,5 triazole (3 carbon) amino acid
  MISC_FEATURE (9)..(13): Crosslink between residues
  MOD_RES (13)..(13): Alpha-Me alkyne 1,5 triazole (5 carbon) amino acid
  MOD_RES (16)..(16): 2-aminoisobutyric acid
  C-term NH2
IWIAQALRXIGDXFNXFYAHH

SEQ ID NO: 1014 - protein, 21 aa, Artificial Sequence
  Description of Artificial Sequence: Synthetic peptide
  N-term Ac
  MOD_RES (9)..(9): Alpha-Me alkyne 1,5 triazole (5 carbon) amino acid
  MISC_FEATURE (9)..(13): Crosslink between residues
  MOD_RES (13)..(13): Alpha-Me azide 1,5 triazole (3 carbon) amino acid
  MOD_RES (16)..(16): 2-aminoisobutyric acid
  C-term NH2
IWIAQALRXIGDXFNXFYAHH

SEQ ID NO: 1015 - protein, 21 aa, Artificial Sequence
  Description of Artificial Sequence: Synthetic peptide
  N-term Ac
  MOD_RES (9)..(9): Alpha-Me R8-octenyl-alanine olefin amino acid connected by an all-carbon crosslinker comprising one double bond
  MISC_FEATURE (9)..(16): Crosslink between residues
  MOD_RES (16)..(16): Alpha-Me S5-pentenyl-alanine olefin amino acid connected by an all-carbon crosslinker comprising one double bond
  C-term NH2
IWIAQALRAIGDAFNAYYARR

SEQ ID NO: 1016 - protein, 21 aa, Artificial Sequence
  Description of Artificial Sequence: Synthetic peptide
  N-term Ac
  MOD_RES (2)..(2): (S)-2-amino-3-(7-(diethylamino)-2-oxo-2H-chromene-3- carboxamido)propanoic acid
  MOD_RES (9)..(9): Alpha-Me S5-pentenyl-alanine olefin amino acid connected by an all-carbon crosslinker comprising one double bond
  MISC_FEATURE (9)..(13): Crosslink between residues
  MOD_RES (13)..(13): Alpha-Me S5-pentenyl-alanine olefin amino acid connected by an all-carbon crosslinker comprising one double bond
  MOD_RES (16)..(16): 2-aminoisobutyric acid
  C-term NH2
IXIAQELRAIGDAFNXFYAHH

SEQ ID NO: 1017 - protein, 21 aa, Artificial Sequence
  Description of Artificial Sequence: Synthetic peptide
  N-term Ac
  MOD_RES (2)..(2): (S)-2-amino-3-(7-(diethylamino)-2-oxo-2H-chromene-3- carboxamido)propanoic acid
  MOD_RES (9)..(9): Alpha-Me S5-pentenyl-alanine olefin amino acid connected by an all-carbon crosslinker comprising one double bond
  MISC_FEATURE (9)..(13): Crosslink between residues
  MOD_RES (13)..(13): Alpha-Me S5-pentenyl-alanine olefin amino acid connected by an all-carbon crosslinker comprising one double bond
  MOD_RES (16)..(16): 2-aminoisobutyric acid
  C-term NH2
IXIAQALDAIGRAFNXFYAHH

SEQ ID NO: 1018 - protein, 21 aa, Artificial Sequence
  Description of Artificial Sequence: Synthetic peptide
  N-term Ac
  MOD_RES (2)..(2): (S)-2-amino-3-(7-(diethylamino)-2-oxo-2H-chromene-3- carboxamido)propanoic acid
  MOD_RES (9)..(9): Alpha-Me S5-pentenyl-alanine olefin amino acid connected by an all-carbon crosslinker comprising one double bond
  MISC_FEATURE (9)..(13): Crosslink between residues
  MOD_RES (13)..(13): Alpha-Me S5-pentenyl-alanine olefin amino acid connected by an all-carbon crosslinker comprising one double bond
  MOD_RES (16)..(16): 2-aminoisobutyric acid
  C-term NH2
IXIAQALRAIGDAFNXFYAAA

SEQ ID NO: 1019 - protein, 19 aa, Artificial Sequence
  Description of Artificial Sequence: Synthetic peptide
  N-term Ac
  MOD_RES (2)..(2): (S)-2-amino-3-(7-(diethylamino)-2-oxo-2H-chromene-3- carboxamido)propanoic acid
  MOD_RES (9)..(9): Alpha-Me S5-pentenyl-alanine olefin amino acid connected by an all-carbon crosslinker comprising one double bond
  MISC_FEATURE (9)..(13): Crosslink between residues
  MOD_RES (13)..(13): Alpha-Me S5-pentenyl-alanine olefin amino acid connected by an all-carbon crosslinker comprising one double bond
  MOD_RES (16)..(16): 2-aminoisobutyric acid
  C-term NH2
IXIAQALRAIGDAFNXFYA

SEQ ID NO: 1020 - protein, 21 aa, Artificial Sequence
  Description of Artificial Sequence: Synthetic peptide
  N-term Ac
  MOD_RES (2)..(2): (S)-2-amino-3-(7-(diethylamino)-2-oxo-2H-chromene-3- carboxamido)propanoic acid
  MOD_RES (9)..(9): Alpha-Me S5-pentenyl-alanine olefin amino acid connected by an all-carbon crosslinker comprising one double bond
  MISC_FEATURE (9)..(13): Crosslink between residues
  MOD_RES (13)..(13): Alpha-Me S5-pentenyl-alanine olefin amino acid connected by an all-carbon crosslinker comprising one double bond
  MOD_RES (16)..(16): 2-aminoisobutyric acid
  C-term NH2
RXIAQQLRAIGDAFNXFYAHH

SEQ ID NO: 1021 - protein, 21 aa, Artificial Sequence
  Description of Artificial Sequence: Synthetic peptide
  N-term Ac
  MOD_RES (2)..(2): (S)-2-amino-3-(7-(diethylamino)-2-oxo-2H-chromene-3- carboxamido)propanoic acid
  MOD_RES (9)..(9): Alpha-Me S5-pentenyl-alanine olefin amino acid connected by an all-carbon crosslinker comprising one double bond
  MISC_FEATURE (9)..(13): Crosslink between residues
  MOD_RES (13)..(13): Alpha-Me S5-pentenyl-alanine olefin amino acid connected by an all-carbon crosslinker comprising one double bond
  MOD_RES (16)..(16): 2-aminoisobutyric acid
  C-term NH2
RXIAQALRAIGDAFNXFYAHH

SEQ ID NO: 1022 - protein, 21 aa, Artificial Sequence
  Description of Artificial Sequence: Synthetic peptide
  N-term Ac
  MOD_RES (2)..(2): (S)-2-amino-3-(7-(diethylamino)-2-oxo-2H-chromene-3- carboxamido)propanoic acid
  MOD_RES (9)..(9): Alpha-Me S5-pentenyl-alanine olefin amino acid connected by an all-carbon crosslinker comprising one double bond
  MISC_FEATURE (9)..(13): Crosslink between residues
  MOD_RES (13)..(13): Alpha-Me S5-pentenyl-alanine olefin amino acid connected by an all-carbon crosslinker comprising one double bond
  MOD_RES (16)..(16): 2-aminoisobutyric acid
  C-term NH2
RXIAQELRAIGDAFNXFYAHH

SEQ ID NO: 1023 - protein, 21 aa, Artificial Sequence
  Description of Artificial Sequence: Synthetic peptide
  N-term Ac
  MOD_RES (2)..(2): (S)-2-amino-3-(7-(diethylamino)-2-oxo-2H-chromene-3- carboxamido)propanoic acid
  MOD_RES (9)..(9): Alpha-Me S5-pentenyl-alanine olefin amino acid connected by an all-carbon crosslinker comprising one double bond
  MISC_FEATURE (9)..(13): Crosslink between residues
  MOD_RES (13)..(13): Alpha-Me S5-pentenyl-alanine olefin amino acid connected by an all-carbon crosslinker comprising one double bond
  MOD_RES (16)..(16): 2-aminoisobutyric acid
  C-term NH2
RXIAQALDAIGRAFNXFYAHH

SEQ ID NO: 1024 - protein, 21 aa, Artificial Sequence
  Description of Artificial Sequence: Synthetic peptide
  N-term Ac
  MOD_RES (2)..(2): (S)-2-amino-3-(7-(diethylamino)-2-oxo-2H-chromene-3- carboxamido)propanoic acid
  MOD_RES (9)..(9): Alpha-Me S5-pentenyl-alanine olefin amino acid connected by an all-carbon crosslinker comprising one double bond
  MISC_FEATURE (9)..(13): Crosslink between residues
  MOD_RES (13)..(13): Alpha-Me S5-pentenyl-alanine olefin amino acid connected by an all-carbon crosslinker comprising one double bond
  MOD_RES (16)..(16): 2-aminoisobutyric acid
  C-term NH2
RXIAQALRAIGDAFNXFYAAA

SEQ ID NO: 1025 - protein, 19 aa, Artificial Sequence
  Description of Artificial Sequence: Synthetic peptide
  N-term Ac
  MOD_RES (2)..(2): (S)-2-amino-3-(7-(diethylamino)-2-oxo-2H-chromene-3- carboxamido)propanoic acid
  MOD_RES (9)..(9): Alpha-Me S5-pentenyl-alanine olefin amino acid connected by an all-carbon crosslinker comprising one double bond
  MISC_FEATURE (9)..(13): Crosslink between residues
  MOD_RES (13)..(13): Alpha-Me S5-pentenyl-alanine olefin amino acid connected by an all-carbon crosslinker comprising one double bond
  MOD_RES (16)..(16): 2-aminoisobutyric acid
  C-term NH2
RXIAQALRAIGDAFNXFYA

SEQ ID NO: 1026 - protein, 21 aa, Artificial Sequence
  Description of Artificial Sequence: Synthetic peptide
  N-term Ac
  MOD_RES (9)..(9): Alpha-Me R8-octenyl-alanine olefin amino acid connected by an all-carbon crosslinker comprising one double bond
  MISC_FEATURE (9)..(16): Crosslink between residues
  MOD_RES (13)..(13): 2-aminoisobutyric acid
  MOD_RES (16)..(16): Alpha-Me S5-pentenyl-alanine olefin amino acid connected by an all-carbon crosslinker comprising one double bond
  C-term NH2
IWIAQALRAIGAXFNAFYAHH

SEQ ID NO: 1027 - protein, 21 aa, Artificial Sequence
  Description of Artificial Sequence: Synthetic peptide
  N-term Ac
  MOD_RES (5)..(5): Alpha-Me S5-pentenyl-alanine olefin amino acid connected by an all-carbon crosslinker comprising one double bond
  MISC_FEATURE (5)..(9): Crosslink between residues
  MOD_RES (9)..(9): Two pentenyl-alanine olefin side chains, each of which is crosslinked to another amino acid as indicated
  MISC_FEATURE (9)..(13): Crosslink between residues
  MOD_RES (13)..(13): Alpha-Me R5-pentenyl-alanine olefin amino acid connected by an all-carbon crosslinker comprising one double bond
  C-term NH2
IWIAAALRAIGDAFNAYYARR

SEQ ID NO: 1028 - protein, 20 aa, Artificial Sequence
  Description of Artificial Sequence: Synthetic peptide
  N-term Pr
  MOD_RES (1)..(1): (S)-2-amino-3-(7-(diethylamino)-2-oxo-2H-chromene-3- carboxamido)propanoic acid
  MOD_RES (8)..(8): Alpha-Me S5-pentenyl-alanine olefin amino acid connected by an all-carbon crosslinker comprising one double bond
  MISC_FEATURE (8)..(12): Crosslink between residues
  MOD_RES (12)..(12): Alpha-Me S5-pentenyl-alanine olefin amino acid connected by an all-carbon crosslinker comprising one double bond
  MOD_RES (15)..(15): 2-aminoisobutyric acid
  C-term NH2
XIAQALRAIGDAFNXFYAHH

SEQ ID NO: 1029 - protein, 20 aa, Artificial Sequence
  Description of Artificial Sequence: Synthetic peptide
  N-term Pr
  MOD_RES (1)..(1): (S)-2-amino-3-(7-(diethylamino)-2-oxo-2H-chromene-3- carboxamido)propanoic acid
  MOD_RES (8)..(8): Alpha-Me S5-pentenyl-alanine olefin amino acid connected by an all-carbon crosslinker comprising one double bond
  MISC_FEATURE (8)..(12): Crosslink between residues
  MOD_RES (12)..(12): Alpha-Me S5-pentenyl-alanine olefin amino acid connected by an all-carbon crosslinker comprising one double bond
  MOD_RES (15)..(15): 2-aminoisobutyric acid
  C-term NH2
XIAQALRAIGDAFNXFYQHH

SEQ ID NO: 1030 - protein, 21 aa, Artificial Sequence
  Description of Artificial Sequence: Synthetic peptide
  N-term Ac
  MOD_RES (9)..(9): Alpha-Me S5-pentenyl-alanine olefin amino acid connected by an all-carbon crosslinker comprising one double bond
  MISC_FEATURE (9)..(13): Crosslink between residues
  MOD_RES (13)..(13): Alpha-Me S5-pentenyl-alanine olefin amino acid connected by an all-carbon crosslinker comprising one double bond
  MOD_RES (16)..(16): 2-aminoisobutyric acid
  C-term NH2
RWIAQELRAIGDAFNXFYAHH

SEQ ID NO: 1031 - protein, 21 aa, Artificial Sequence
  Description of Artificial Sequence: Synthetic peptide
  N-term Ac
  MOD_RES (9)..(9): Alpha-Me S5-pentenyl-alanine olefin amino acid connected by an all-carbon crosslinker comprising one double bond
  MISC_FEATURE (9)..(13): Crosslink between residues
  MOD_RES (13)..(13): Alpha-Me S5-pentenyl-alanine olefin amino acid connected by an all-carbon crosslinker comprising one double bond
  MOD_RES (16)..(16): 2-aminoisobutyric acid
  C-term NH2
RWIAQALDAIGRAFNXFYAHH

SEQ ID NO: 1032 - protein, 21 aa, Artificial Sequence
  Description of Artificial Sequence: Synthetic peptide
  N-term Ac
  MOD_RES (9)..(9): Alpha-Me S5-pentenyl-alanine olefin amino acid connected by an all-carbon crosslinker comprising one double bond
  MISC_FEATURE (9)..(13): Crosslink between residues
  MOD_RES (13)..(13): Alpha-Me S5-pentenyl-alanine olefin amino acid connected by an all-carbon crosslinker comprising one double bond
  MOD_RES (16)..(16): 2-aminoisobutyric acid
  C-term NH2
RWIAQALRAIGDAFNXFYAAA

SEQ ID NO: 1033 - protein, 19 aa, Artificial Sequence
  Description of Artificial Sequence: Synthetic peptide
  N-term Ac
  MOD_RES (9)..(9): Alpha-Me S5-pentenyl-alanine olefin amino acid connected by an all-carbon crosslinker comprising one double bond
  MISC_FEATURE (9)..(13): Crosslink between residues
  MOD_RES (13)..(13): Alpha-Me S5-pentenyl-alanine olefin amino acid connected by an all-carbon crosslinker comprising one double bond
  MOD_RES (16)..(16): 2-aminoisobutyric acid
  C-term NH2
RWIAQALRAIGDAFNXFYA

SEQ ID NO: 1034 - protein, 21 aa, Artificial Sequence
  Description of Artificial Sequence: Synthetic peptide
  N-term Ac
  MOD_RES (2)..(2): (S)-2-amino-3-(7-(diethylamino)-2-oxo-2H-chromene-3- carboxamido)propanoic acid
  C-term NH2
IXIAQALRRIGDEFNAYYAHH

SEQ ID NO: 1035 - protein, 21 aa, Artificial Sequence
  Description of Artificial Sequence: Synthetic peptide
  N-term Ac
  MOD_RES (2)..(2): (S)-2-amino-3-(7-(diethylamino)-2-oxo-2H-chromene-3- carboxamido)propanoic acid
  MOD_RES (9)..(9): Alpha-Me S5-pentenyl-alanine olefin amino acid connected by an all-carbon crosslinker comprising one double bond
  MISC_FEATURE (9)..(13): Crosslink between residues
  MOD_RES (13)..(13): Alpha-Me S5-pentenyl-alanine olefin amino acid connected by an all-carbon crosslinker comprising one double bond
  MOD_RES (16)..(16): 2-aminoisobutyric acid
  C-term NH2
IXIAQELRAIGDAFNXFYAHH

SEQ ID NO: 1036 - protein, 21 aa, Artificial Sequence
  Description of Artificial Sequence: Synthetic peptide
  N-term Ac
  MOD_RES (2)..(2): (S)-2-amino-3-(7-(diethylamino)-2-oxo-2H-chromene-3- carboxamido)propanoic acid
  MOD_RES (9)..(9): Alpha-Me S5-pentenyl-alanine olefin amino acid connected by an all-carbon crosslinker comprising one double bond
  MISC_FEATURE (9)..(13): Crosslink between residues
  MOD_RES (13)..(13): Alpha-Me S5-pentenyl-alanine olefin amino acid connected by an all-carbon crosslinker comprising one double bond
  MOD_RES (16)..(16): 2-aminoisobutyric acid
  C-term NH2
IXIAQALDAIGRAFNXFYAHH

SEQ ID NO: 1037 - protein, 21 aa, Artificial Sequence
  Description of Artificial Sequence: Synthetic peptide
  N-term Ac
  MOD_RES (2)..(2): (S)-2-amino-3-(6,7-dimethoxy-2-oxo-2H-chromene-3- carboxamido)propanoic acid
  MOD_RES (9)..(9): Alpha-Me R5-pentenyl-alanine olefin amino acid connected by an all-carbon crosslinker comprising one double bond
  MISC_FEATURE (9)..(13): Crosslink between residues
  MOD_RES (13)..(13): Two pentenyl-alanine olefin side chains, each of which is crosslinked to another amino acid as indicated
  MISC_FEATURE (13)..(17): Crosslink between residues
  MOD_RES (17)..(17): Alpha-Me S5-pentenyl-alanine olefin amino acid connected by an all-carbon crosslinker comprising one double bond
  C-term NH2
IXIAQALRAIGDAFNAAYAHH

SEQ ID NO: 1038 - protein, 21 aa, Artificial Sequence
  Description of Artificial Sequence: Synthetic peptide
  N-term Ac
  MOD_RES (2)..(2): (S)-2-amino-3-(6,7-dimethoxy-2-oxo-2H-chromene-3- carboxamido)propanoic acid
  MOD_RES (9)..(9): Alpha-Me R5-pentenyl-alanine olefin amino acid connected by an all-carbon crosslinker comprising one double bond
  MISC_FEATURE (9)..(13): Crosslink between residues
  MOD_RES (13)..(13): Two pentenyl-alanine olefin side chains, each of which is crosslinked to another amino acid as indicated
  MISC_FEATURE (13)..(17): Crosslink between residues
  MOD_RES (17)..(17): Alpha-Me S5-pentenyl-alanine olefin amino acid connected by an all-carbon crosslinker comprising one double bond
  C-term NH2
RXIAQALRAIGDAFNAAYAHH

SEQ ID NO: 1039 - protein, 21 aa, Artificial Sequence
  Description of Artificial Sequence: Synthetic peptide
  N-term Ac
  MOD_RES (2)..(2): (S)-2-amino-3-(6,7-dimethoxy-2-oxo-2H-chromene-3- carboxamido)propanoic acid
  MOD_RES (9)..(9): Alpha-Me S5-pentenyl-alanine olefin amino acid connected by an all-carbon crosslinker comprising one double bond
  MISC_FEATURE (9)..(13): Crosslink between residues
  MOD_RES (13)..(13): Alpha-Me S5-pentenyl-alanine olefin amino acid connected by an all-carbon crosslinker comprising one double bond
  MOD_RES (16)..(16): 2-aminoisobutyric acid
  C-term NH2
IXIAQALRAIGDAFNXFYAHH

SEQ ID NO: 1040 - protein, 21 aa, Artificial Sequence
  Description of Artificial Sequence: Synthetic peptide
  N-term Ac
  MOD_RES (2)..(2): (S)-2-amino-3-(6,7-dimethoxy-2-oxo-2H-chromene-3- carboxamido)propanoic acid
  MOD_RES (9)..(9): Alpha-Me S5-pentenyl-alanine olefin amino acid connected by an all-carbon crosslinker comprising one double bond
  MISC_FEATURE (9)..(13): Crosslink between residues
  MOD_RES (13)..(13): Alpha-Me S5-pentenyl-alanine olefin amino acid connected by an all-carbon crosslinker comprising one double bond
  MOD_RES (16)..(16): 2-aminoisobutyric acid
  C-term NH2
IXIAQQLRAIGDAFNXFYAHH

SEQ ID NO: 1041 - protein, 21 aa, Artificial Sequence
  Description of Artificial Sequence: Synthetic peptide
  N-term Ac
  MOD_RES (2)..(2): (S)-2-amino-3-(6,7-dimethoxy-2-oxo-2H-chromene-3- carboxamido)propanoic acid
  MOD_RES (9)..(9): Alpha-Me S5-pentenyl-alanine olefin amino acid connected by an all-carbon crosslinker comprising one double bond
  MISC_FEATURE (9)..(13): Crosslink between residues
  MOD_RES (13)..(13): Alpha-Me S5-pentenyl-alanine olefin amino acid connected by an all-carbon crosslinker comprising one double bond
  MOD_RES (16)..(16): 2-aminoisobutyric acid
  C-term NH2
RXIAQALRAIGDALNXFYAHH

SEQ ID NO: 1042 - protein, 21 aa, Artificial Sequence
  Description of Artificial Sequence: Synthetic peptide
  N-term Ac
  MOD_RES (9)..(9): Alpha-Me alkyne 1,5 triazole (5 carbon) amino acid
  MISC_FEATURE (9)..(13): Crosslink between residues
  MOD_RES (13)..(13): Alpha-Me azide 1,5 triazole (3 carbon) amino acid
  MOD_RES (16)..(16): 2-aminoisobutyric acid
  C-term NH2
IWIAQALRXIGDXFNXFYAHH

SEQ ID NO: 1043 - protein, 21 aa, Artificial Sequence
  Description of Artificial Sequence: Synthetic peptide
  N-term Ac
  MOD_RES (9)..(9): unbridged alpha-Me R-azide (3 carbon) amino acid
  MOD_RES (13)..(13): 2-amino-2-(pent-4-yn-1-yl)hept-6-ynoic acid
  MOD_RES (17)..(17): unbridged alpha-Me azide (3 carbon) amino acid
  C-term NH2
RWIAQALRAIGDXFNAAYAHH

SEQ ID NO: 1044 - protein, 21 aa, Artificial Sequence
  Description of Artificial Sequence: Synthetic peptide
  N-term Ac
  MOD_RES (2)..(2): (S)-2-amino-3-(7-(diethylamino)-2-oxo-2H-chromene-3- carboxamido)propanoic acid
  MOD_RES (5)..(5): Alpha-Me R5-pentenyl-alanine olefin amino acid connected by an all-carbon crosslinker comprising one double bond
  MISC_FEATURE (5)..(9): Crosslink between residues
  MOD_RES (9)..(9): Two pentenyl-alanine olefin side chains, each of which is crosslinked to another amino acid as indicated
  MISC_FEATURE (9)..(13): Crosslink between residues
  MOD_RES (13)..(13): Alpha-Me S5-pentenyl-alanine olefin amino acid connected by an all-carbon crosslinker comprising one double bond
  C-term NH2
IXIAAALRAIGDAFNAYYARR

SEQ ID NO: 1045 - protein, 21 aa, Artificial Sequence
  Description of Artificial Sequence: Synthetic peptide
  N-term Ac
  MOD_RES (2)..(2): (S)-2-amino-3-(7-(diethylamino)-2-oxo-2H-chromene-3- carboxamido)propanoic acid
  MOD_RES (5)..(5): Alpha-Me R5-pentenyl-alanine olefin amino acid connected by an all-carbon crosslinker comprising one double bond
  MISC_FEATURE (5)..(9): Crosslink between residues
  MOD_RES (9)..(9): Two pentenyl-alanine olefin side chains, each of which is crosslinked to another amino acid as indicated
  MISC_FEATURE (9)..(13): Crosslink between residues
  MOD_RES (13)..(13): Alpha-Me S5-pentenyl-alanine olefin amino acid connected by an all-carbon crosslinker comprising one double bond
  C-term NH2
IXIAAQLRAIGDAFNAYYARR

SEQ ID NO: 1046 - protein, 21 aa, Artificial Sequence
  Description of Artificial Sequence: Synthetic peptide
  N-term Ac
  MOD_RES (2)..(2): (S)-2-amino-3-(6,7-dimethoxy-2-oxo-2H-chromene-3- carboxamido)propanoic acid
  MOD_RES (5)..(5): Alpha-Me R5-pentenyl-alanine olefin amino acid connected by an all-carbon crosslinker comprising one double bond
  MISC_FEATURE (5)..(9): Crosslink between residues
  MOD_RES (9)..(9): Two pentenyl-alanine olefin side chains, each of which is crosslinked to another amino acid as indicated
  MISC_FEATURE (9)..(13): Crosslink between residues
  MOD_RES (13)..(13): Alpha-Me S5-pentenyl-alanine olefin amino acid connected by an all-carbon crosslinker comprising one double bond
  C-term NH2
IXIAAALRAIGDAFNAYYARR

SEQ ID NO: 1047 - protein, 21 aa, Artificial Sequence
  Description of Artificial Sequence: Synthetic peptide
  N-term Ac
  MOD_RES (2)..(2): (S)-2-amino-3-(6,7-dimethoxy-2-oxo-2H-chromene-3- carboxamido)propanoic acid
  MOD_RES (5)..(5): Alpha-Me R5-pentenyl-alanine olefin amino acid connected by an all-carbon crosslinker comprising one double bond
  MISC_FEATURE (5)..(9): Crosslink between residues
  MOD_RES (9)..(9): Two pentenyl-alanine olefin side chains, each of which is crosslinked to another amino acid as indicated
  MISC_FEATURE (9)..(13): Crosslink between residues
  MOD_RES (13)..(13): Alpha-Me S5-pentenyl-alanine olefin amino acid connected by an all-carbon crosslinker comprising one double bond
  C-term NH2
IXIAAQLRAIGDAFNAYYARR

SEQ ID NO: 1048 - protein, 21 aa, Artificial Sequence
  Description of Artificial Sequence: Synthetic peptide
  N-term Ac
  MOD_RES (2)..(2): (S)-2-amino-3-(7-(diethylamino)-2-oxo-2H-chromene-3- carboxamido)propanoic acid
  MOD_RES (9)..(9): Alpha-Me S5-pentenyl-alanine olefin amino acid connected by an all-carbon crosslinker comprising one double bond
  MISC_FEATURE (9)..(13): Crosslink between residues
  MOD_RES (13)..(13): Two pentenyl-alanine olefin side chains, each of which is crosslinked to another amino acid as indicated
  MISC_FEATURE (13)..(17): Crosslink between residues
  MOD_RES (17)..(17): Alpha-Me R5-pentenyl-alanine olefin amino acid connected by an all-carbon crosslinker comprising one double bond
  C-term NH2
RXIAQALRAIGDAFNAAYAHH

SEQ ID NO: 1049 - protein, 21 aa, Artificial Sequence
  Description of Artificial Sequence: Synthetic peptide
  N-term Ac
  MOD_RES (2)..(2): (S)-2-amino-3-(6,7-dimethoxy-2-oxo-2H-chromene-3- carboxamido)propanoic acid
  MOD_RES (9)..(9): Alpha-Me S5-pentenyl-alanine olefin amino acid connected by an all-carbon crosslinker comprising one double bond
  MISC_FEATURE (9)..(13): Crosslink between residues
  MOD_RES (13)..(13): Two pentenyl-alanine olefin side chains, each of which is crosslinked to another amino acid as indicated
  MISC_FEATURE (13)..(17): Crosslink between residues
  MOD_RES (17)..(17): Alpha-Me R5-pentenyl-alanine olefin amino acid connected by an all-carbon crosslinker comprising one double bond
  C-term NH2
RXIAQALRAIGDAFNAAYAHH

SEQ ID NO: 1050 - protein, 21 aa, Artificial Sequence
  Description of Artificial Sequence: Synthetic peptide
  N-term Ac
  MOD_RES (2)..(2): (S)-2-amino-3-(7-hydroxy-2-oxo-2H-chromene-3-carboxamido)propanoic acid
  MOD_RES (9)..(9): Alpha-Me R5-pentenyl-alanine olefin amino acid connected by an all-carbon crosslinker comprising one double bond
  MISC_FEATURE (9)..(13): Crosslink between residues
  MOD_RES (13)..(13): Two pentenyl-alanine olefin side chains, each of which is crosslinked to another amino acid as indicated
  MISC_FEATURE (13)..(17): Crosslink between residues
  MOD_RES (17)..(17): Alpha-Me S5-pentenyl-alanine olefin amino acid connected by an all-carbon crosslinker comprising one double bond
  C-term NH2
IXIAQQLRAIGDAFNAAYAHH

SEQ ID NO: 1051 - protein, 21 aa, Artificial Sequence
  Description of Artificial Sequence: Synthetic peptide
  N-term Ac
  MOD_RES (2)..(2): (S)-2-amino-3-(7-hydroxy-2-oxo-2H-chromene-3-carboxamido)propanoic acid
  MOD_RES (9)..(9): Alpha-Me R5-pentenyl-alanine olefin amino acid connected by an all-carbon crosslinker comprising one double bond
  MISC_FEATURE (9)..(13): Crosslink between residues
  MOD_RES (13)..(13): Two pentenyl-alanine olefin side chains, each of which is crosslinked to another amino acid as indicated
  MISC_FEATURE (13)..(17): Crosslink between residues
  MOD_RES (17)..(17): Alpha-Me S5-pentenyl-alanine olefin amino acid connected by an all-carbon crosslinker comprising one double bond
  C-term NH2
RXIAQQLRAIGDAFNAAYAHH

SEQ ID NO: 1052 - protein, 21 aa, Artificial Sequence
  Description of Artificial Sequence: Synthetic peptide
  N-term Ac
  MOD_RES (9)..(9): Alpha-Me S5-pentenyl-alanine olefin amino acid connected by an all-carbon crosslinker comprising one double bond
  MISC_FEATURE (9)..(13): Crosslink between residues
  MOD_RES (13)..(13): Alpha-Me S5-pentenyl-alanine olefin amino acid connected by an all-carbon crosslinker comprising one double bond
  MOD_RES (16)..(16): 2-aminoisobutyric acid
  MOD_RES (17)..(17): (S)-2-amino-3-(7-hydroxy-2-oxo-2H-chromene-3-carboxamido)propanoic acid
  C-term NH2
IWIAQALRAIGDAFNXXYAHH

SEQ ID NO: 1053 - protein, 21 aa, Artificial Sequence
  Description of Artificial Sequence: Synthetic peptide
  N-term Ac
  MOD_RES (9)..(9): Alpha-Me S5-pentenyl-alanine olefin amino acid connected by an all-carbon crosslinker comprising one double bond
  MISC_FEATURE (9)..(13): Crosslink between residues
  MOD_RES (13)..(13): Alpha-Me S5-pentenyl-alanine olefin amino acid connected by an all-carbon crosslinker comprising one double bond
  MOD_RES (16)..(16): 2-aminoisobutyric acid
  MOD_RES (17)..(17): (S)-2-amino-3-(7-hydroxy-2-oxo-2H-chromene-3-carboxamido)propanoic acid
  C-term NH2
IRIAQALRAIGDAFNXXYAHH

SEQ ID NO: 1054 - protein, 21 aa, Artificial Sequence
  Description of Artificial Sequence: Synthetic peptide
  N-term Ac
  MOD_RES (2)..(2): (S)-2-amino-3-(7-(diethylamino)-2-oxo-2H-chromene-3- carboxamido)propanoic acid
  MOD_RES (9)..(9): Alpha-Me R5-pentenyl-alanine olefin amino acid connected by an all-carbon crosslinker comprising one double bond
  MISC_FEATURE (9)..(13): Crosslink between residues
  MOD_RES (13)..(13): Two pentenyl-alanine olefin side chains, each of which is crosslinked to another amino acid as indicated
  MISC_FEATURE (13)..(17): Crosslink between residues
  MOD_RES (17)..(17): Alpha-Me S5-pentenyl-alanine olefin amino acid connected by an all-carbon crosslinker comprising one double bond
  C-term NH2
IXIAQQLRAIGDAFNAAYAHH

SEQ ID NO: 1055 - protein, 21 aa, Artificial Sequence
  Description of Artificial Sequence: Synthetic peptide
  N-term Ac
  MOD_RES (9)..(9): Alpha-Me S5-pentenyl-alanine olefin amino acid connected by an all-carbon crosslinker comprising one double bond
  MISC_FEATURE (9)..(13): Crosslink between residues
  MOD_RES (13)..(13): Alpha-Me S5-pentenyl-alanine olefin amino acid connected by an all-carbon crosslinker comprising one double bond
  MOD_RES (16)..(16): 2-aminoisobutyric acid
  C-term NH2
AAIAQALRAIGDAFNXFYAHH

SEQ ID NO: 1056 - protein, 19 aa, Artificial Sequence
  Description of Artificial Sequence: Synthetic peptide
  N-term Ac
  MOD_RES (9)..(9): Alpha-Me S5-pentenyl-alanine olefin amino acid connected by an all-carbon crosslinker comprising one double bond
  MISC_FEATURE (9)..(13): Crosslink between residues
  MOD_RES (13)..(13): Alpha-Me S5-pentenyl-alanine olefin amino acid connected by an all-carbon crosslinker comprising one double bond
  MOD_RES (16)..(16): 2-aminoisobutyric acid
  C-term NH2
AAIAQALRAIGDAFNXFYA

SEQ ID NO: 1057 - protein, 23 aa, Artificial Sequence
  Description of Artificial Sequence: Synthetic peptide
  N-term Ac
  MOD_RES (9)..(9): Alpha-Me S5-pentenyl-alanine olefin amino acid connected by an all-carbon crosslinker comprising one double bond
  MISC_FEATURE (9)..(13): Crosslink between residues
  MOD_RES (13)..(13): Alpha-Me S5-pentenyl-alanine olefin amino acid connected by an all-carbon crosslinker comprising one double bond
  MOD_RES (16)..(16): 2-aminoisobutyric acid
  MOD_RES (23)..(23): D-amino acid
  C-term NH2
IWIAQALRAIGDAFNXFYAAAAA

SEQ ID NO: 1058 - protein, 22 aa, Artificial Sequence
  Description of Artificial Sequence: Synthetic peptide
  N-term Ac
  MOD_RES (9)..(9): Alpha-Me S5-pentenyl-alanine olefin amino acid connected by an all-carbon crosslinker comprising one double bond
  MISC_FEATURE (9)..(13): Crosslink between residues
  MOD_RES (13)..(13): Alpha-Me S5-pentenyl-alanine olefin amino acid connected by an all-carbon crosslinker comprising one double bond
  MOD_RES (16)..(16): 2-aminoisobutyric acid
  MOD_RES (22)..(22): D-amino acid
  C-term NH2
IWIAQALRAIGDAFNXAAAAAA

SEQ ID NO: 1059 - protein, 26 aa, Artificial Sequence
  Description of Artificial Sequence: Synthetic peptide
  N-term Ac
  MOD_RES (9)..(9): Alpha-Me S5-pentenyl-alanine olefin amino acid connected by an all-carbon crosslinker comprising one double bond
  MISC_FEATURE (9)..(13): Crosslink between residues
  MOD_RES (13)..(13): Alpha-Me S5-pentenyl-alanine olefin amino acid connected by an all-carbon crosslinker comprising one double bond
  MOD_RES (16)..(16): 2-aminoisobutyric acid
  MOD_RES (26)..(26): D-amino acid
  C-term NH2
IWIAQALRAIGDAFNXFYAHHAAAAA

SEQ ID NO: 1060 - protein, 21 aa, Artificial Sequence
  Description of Artificial Sequence: Synthetic peptide
  N-term Ac
  MOD_RES (9)..(9): Alpha-Me S5-pentenyl-alanine olefin amino acid connected by an all-carbon crosslinker comprising one double bond
  MISC_FEATURE (9)..(13): Crosslink between residues
  MOD_RES (13)..(13): Alpha-Me S5-pentenyl-alanine olefin amino acid connected by an all-carbon crosslinker comprising one double bond
  MOD_RES (16)..(16): 2-aminoisobutyric acid
  C-term NH2
IWIAQALAAIGDAFNXFYAHH

SEQ ID NO: 1061 - protein, 19 aa, Artificial Sequence
  Description of Artificial Sequence: Synthetic peptide
  N-term Ac
  MOD_RES (9)..(9): Alpha-Me S5-pentenyl-alanine olefin amino acid connected by an all-carbon crosslinker comprising one double bond
  MISC_FEATURE (9)..(13): Crosslink between residues
  MOD_RES (13)..(13): Alpha-Me S5-pentenyl-alanine olefin amino acid connected by an all-carbon crosslinker comprising one double bond
  MOD_RES (16)..(16): 2-aminoisobutyric acid
  C-term NH2
IWIAQALRAIGDAFAXFYA

SEQ ID NO: 1062 - protein, 19 aa, Artificial Sequence
  Description of Artificial Sequence: Synthetic peptide
  N-term Ac
  MOD_RES (9)..(9): Alpha-Me S5-pentenyl-alanine olefin amino acid connected by an all-carbon crosslinker comprising one double bond
  MISC_FEATURE (9)..(13): Crosslink between residues
  MOD_RES (13)..(13): Alpha-Me S5-pentenyl-alanine olefin amino acid connected by an all-carbon crosslinker comprising one double bond
  MOD_RES (16)..(16): 2-aminoisobutyric acid
  C-term NH2
IWIALALRAIGDAFAXFYA

SEQ ID NO: 1063 - protein, 19 aa, Artificial Sequence
  Description of Artificial Sequence: Synthetic peptide
  N-term Ac
  MOD_RES (9)..(9): Alpha-Me S5-pentenyl-alanine olefin amino acid connected by an all-carbon crosslinker comprising one double bond
  MISC_FEATURE (9)..(13): Crosslink between residues
  MOD_RES (13)..(13): Alpha-Me S5-pentenyl-alanine olefin amino acid connected by an all-carbon crosslinker comprising one double bond
  MOD_RES (16)..(16): 2-aminoisobutyric acid
  C-term NH2
IWIALALRAIGDAFNXFYA

SEQ ID NO: 1064 - protein, 21 aa, Artificial Sequence
  Description of Artificial Sequence: Synthetic peptide
  N-term Ac
  MOD_RES (9)..(9): Alpha-Me S5-pentenyl-alanine olefin amino acid connected by an all-carbon crosslinker comprising one double bond
  MISC_FEATURE (9)..(13): Crosslink between residues
  MOD_RES (13)..(13): Alpha-Me S5-pentenyl-alanine olefin amino acid connected by an all-carbon crosslinker comprising one double bond
  MOD_RES (16)..(16): 2-aminoisobutyric acid
  C-term NH2
IWIALALRAIGDAFAXFYAHH

SEQ ID NO: 1065 - protein, 19 aa, Artificial Sequence
  Description of Artificial Sequence: Synthetic peptide
  N-term Ac
  MOD_RES (9)..(9): Alpha-Me S5-pentenyl-alanine olefin amino acid connected by an all-carbon crosslinker comprising one double bond
  MISC_FEATURE (9)..(13): Crosslink between residues
  MOD_RES (13)..(13): Alpha-Me S5-pentenyl-alanine olefin amino acid connected by an all-carbon crosslinker comprising one double bond
  C-term NH2
IWIALALRAIGDAFAAAAA

SEQ ID NO: 1066 - protein, 19 aa, Artificial Sequence
  Description of Artificial Sequence: Synthetic peptide
  N-term Ac
  MOD_RES (9)..(9): Alpha-Me S5-pentenyl-alanine olefin amino acid connected by an all-carbon crosslinker comprising one double bond
  MISC_FEATURE (9)..(13): Crosslink between residues
  MOD_RES (13)..(13): Alpha-Me S5-pentenyl-alanine olefin amino acid connected by an all-carbon crosslinker comprising one double bond
  C-term NH2
IWIALALRAIGDAFNAAAA

SEQ ID NO: 1067 - protein, 21 aa, Artificial Sequence
  Description of Artificial Sequence: Synthetic peptide
  N-term Ac
  MOD_RES (9)..(9): Alpha-Me S5-pentenyl-alanine olefin amino acid connected by an all-carbon crosslinker comprising one double bond
  MISC_FEATURE (9)..(13): Crosslink between residues
  MOD_RES (13)..(13): Alpha-Me S5-pentenyl-alanine olefin amino acid connected by an all-carbon crosslinker comprising one double bond
  MOD_RES (16)..(16): 2-aminoisobutyric acid
  C-term NH2
IWIALLLRAIGDAFAXFYAHH

SEQ ID NO: 1068 - protein, 21 aa, Artificial Sequence
  Description of Artificial Sequence: Synthetic peptide
  N-term Ac
  MOD_RES (9)..(9): Alpha-Me S5-pentenyl-alanine olefin amino acid connected by an all-carbon crosslinker comprising one double bond
  MISC_FEATURE (9)..(13): Crosslink between residues
  MOD_RES (13)..(13): Alpha-Me S5-pentenyl-alanine olefin amino acid connected by an all-carbon crosslinker comprising one double bond
  MOD_RES (16)..(16): 2-aminoisobutyric acid
  C-term NH2
IWIALLLRAIGDAFNXFYAHH

SEQ ID NO: 1069 - protein, 19 aa, Artificial Sequence
  Description of Artificial Sequence: Synthetic peptide
  N-term Ac
  MOD_RES (9)..(9): Alpha-Me S5-pentenyl-alanine olefin amino acid connected by an all-carbon crosslinker comprising one double bond
  MISC_FEATURE (9)..(13): Crosslink between residues
  MOD_RES (13)..(13): Alpha-Me S5-pentenyl-alanine olefin amino acid connected by an all-carbon crosslinker comprising one double bond
  MOD_RES (16)..(16): 2-aminoisobutyric acid
  C-term NH2
IWIALLLRAIGDAFNXFYA

SEQ ID NO: 1070 - protein, 24 aa, Artificial Sequence
  Description of Artificial Sequence: Synthetic peptide
  N-term Ac
  MOD_RES (9)..(9): Alpha-Me S5-pentenyl-alanine olefin amino acid connected by an all-carbon crosslinker comprising one double bond
  MISC_FEATURE (9)..(13): Crosslink between residues
  MOD_RES (13)..(13): Alpha-Me S5-pentenyl-alanine olefin amino acid connected by an all-carbon crosslinker comprising one double bond
  MOD_RES (16)..(16): 2-aminoisobutyric acid
  MOD_RES (24)..(24): D-amino acid
  C-term NH2
IWIALLLRAIGDAFNXFYAAAAAA

SEQ ID NO: 1071 - protein, 21 aa, Artificial Sequence
  Description of Artificial Sequence: Synthetic peptide
  N-term Ac
  MOD_RES (9)..(9): Alpha-Me R5-pentenyl-alanine olefin amino acid connected by an all-carbon crosslinker comprising one double bond
  MISC_FEATURE (9)..(13): Crosslink between residues
  MOD_RES (13)..(13): Two pentenyl-alanine olefin side chains, each of which is crosslinked to another amino acid as indicated
  MISC_FEATURE (13)..(17): Crosslink between residues
  MOD_RES (17)..(17): Alpha-Me S5-pentenyl-alanine olefin amino acid connected by an all-carbon crosslinker comprising one double bond
  C-term NH2
RWIALQLRAIGDAFNAAYAHH

SEQ ID NO: 1072 - protein, 19 aa, Artificial Sequence
  Description of Artificial Sequence: Synthetic peptide
  N-term Ac
  MOD_RES (9)..(9): Alpha-Me R5-pentenyl-alanine olefin amino acid connected by an all-carbon crosslinker comprising one double bond
  MISC_FEATURE (9)..(13): Crosslink between residues
  MOD_RES (13)..(13): Two pentenyl-alanine olefin side chains, each of which is crosslinked to another amino acid as indicated
  MISC_FEATURE (13)..(17): Crosslink between residues
  MOD_RES (17)..(17): Alpha-Me S5-pentenyl-alanine olefin amino acid connected by an all-carbon crosslinker comprising one double bond
  C-term NH2
RWIAQQLRAIGDAFNAAYA

SEQ ID NO: 1073 - protein, 21 aa, Artificial Sequence
  Description of Artificial Sequence: Synthetic peptide
  N-term Ac
  MOD_RES (9)..(9): Alpha-Me R5-pentenyl-alanine olefin amino acid connected by an all-carbon crosslinker comprising one double bond
  MISC_FEATURE (9)..(13): Crosslink between residues
  MOD_RES (13)..(13): Two pentenyl-alanine olefin side chains, each of which is crosslinked to another amino acid as indicated
  MISC_FEATURE (13)..(17): Crosslink between residues
  MOD_RES (17)..(17): Alpha-Me S5-pentenyl-alanine olefin amino acid connected by an all-carbon crosslinker comprising one double bond
  MOD_RES (21)..(21): D-amino acid
  C-term NH2
RWIAQQLRAIGDAFNAAYAAA

SEQ ID NO: 1074 - protein, 21 aa, Artificial Sequence
  Description of Artificial Sequence: Synthetic peptide
  N-term Ac
  MOD_RES (9)..(9): Alpha-Me R5-pentenyl-alanine olefin amino acid connected by an all-carbon crosslinker comprising one double bond
  MISC_FEATURE (9)..(13): Crosslink between residues
  MOD_RES (13)..(13): Two pentenyl-alanine olefin side chains, each of which is crosslinked to another amino acid as indicated
  MISC_FEATURE (13)..(17): Crosslink between residues
  MOD_RES (17)..(17): Alpha-Me S5-pentenyl-alanine olefin amino acid connected by an all-carbon crosslinker comprising one double bond
  MOD_RES (21)..(21): D-amino acid
  C-term NH2
RWIALQLRAIGDAFNAAYAAA

SEQ ID NO: 1075 - protein, 21 aa, Artificial Sequence
  Description of Artificial Sequence: Synthetic peptide
  N-term Ac
  MOD_RES (2)..(2): (S)-2-amino-3-(7-(diethylamino)-2-oxo-2H-chromene-3- carboxamido)propanoic acid
  MOD_RES (9)..(9): Alpha-Me R5-pentenyl-alanine olefin amino acid connected by an all-carbon crosslinker comprising one double bond
  MISC_FEATURE (9)..(13): Crosslink between residues
  MOD_RES (13)..(13): Two pentenyl-alanine olefin side chains, each of which is crosslinked to another amino acid as indicated
  MISC_FEATURE (13)..(17): Crosslink between residues
  MOD_RES (17)..(17): Alpha-Me S5-pentenyl-alanine olefin amino acid connected by an all-carbon crosslinker comprising one double bond
  C-term NH2
RXIALQLRAIGDAFNAAYAHH

SEQ ID NO: 1076 - protein, 19 aa, Artificial Sequence
  Description of Artificial Sequence: Synthetic peptide
  N-term Ac
  MOD_RES (2)..(2): (S)-2-amino-3-(7-(diethylamino)-2-oxo-2H-chromene-3- carboxamido)propanoic acid
  MOD_RES (9)..(9): Alpha-Me R5-pentenyl-alanine olefin amino acid connected by an all-carbon crosslinker comprising one double bond
  MISC_FEATURE (9)..(13): Crosslink between residues
  MOD_RES (13)..(13): Two pentenyl-alanine olefin side chains, each of which is crosslinked to another amino acid as indicated
  MISC_FEATURE (13)..(17): Crosslink between residues
  MOD_RES (17)..(17): Alpha-Me S5-pentenyl-alanine olefin amino acid connected by an all-carbon crosslinker comprising one double bond
  C-term NH2
RXIAQQLRAIGDAFNAAYA

SEQ ID NO: 1077 - protein, 21 aa, Artificial Sequence
  Description of Artificial Sequence: Synthetic peptide
  N-term Ac
  MOD_RES (2)..(2): (S)-2-amino-3-(7-(diethylamino)-2-oxo-2H-chromene-3- carboxamido)propanoic acid
  MOD_RES (9)..(9): Alpha-Me R5-pentenyl-alanine olefin amino acid connected by an all-carbon crosslinker comprising one double bond
  MISC_FEATURE (9)..(13): Crosslink between residues
  MOD_RES (13)..(13): Two pentenyl-alanine olefin side chains, each of which is crosslinked to another amino acid as indicated
  MISC_FEATURE (13)..(17): Crosslink between residues
  MOD_RES (17)..(17): Alpha-Me S5-pentenyl-alanine olefin amino acid connected by an all-carbon crosslinker comprising one double bond
  MOD_RES (21)..(21): D-amino acid
  C-term NH2
RXIAQQLRAIGDAFNAAYAAA

SEQ ID NO: 1078 - protein, 21 aa, Artificial Sequence
  Description of Artificial Sequence: Synthetic peptide
  N-term Ac
  MOD_RES (2)..(2): (S)-2-amino-3-(7-(diethylamino)-2-oxo-2H-chromene-3- carboxamido)propanoic acid
  MOD_RES (9)..(9): Alpha-Me R5-pentenyl-alanine olefin amino acid connected by an all-carbon crosslinker comprising one double bond
  MISC_FEATURE (9)..(13): Crosslink between residues
  MOD_RES (13)..(13): Two pentenyl-alanine olefin side chains, each of which is crosslinked to another amino acid as indicated
  MISC_FEATURE (13)..(17): Crosslink between residues
  MOD_RES (17)..(17): Alpha-Me S5-pentenyl-alanine olefin amino acid connected by an all-carbon crosslinker comprising one double bond
  MOD_RES (21)..(21): D-amino acid
  C-term NH2
RXIALQLRAIGDAFNAAYAAA

SEQ ID NO: 1079 - protein, 21 aa, Artificial Sequence
  Description of Artificial Sequence: Synthetic peptide
  N-term Ac
  MOD_RES (2)..(2): (S)-2-amino-3-(7-(diethylamino)-2-oxo-2H-chromene-3- carboxamido)propanoic acid
  MOD_RES (9)..(9): Alpha-Me R-azide 1,5 triazole (3 carbon) amino acid
  MISC_FEATURE (9)..(13): Crosslink between residues
  MOD_RES (13)..(13): 2-amino-2-(pent-4-yn-1-yl)hept-6-ynoic acid after Ru-catalyzed cycloaddition
  MISC_FEATURE (13)..(17): Crosslink between residues
  MOD_RES (17)..(17): Alpha-Me azide 1,5 triazole (3 carbon) amino acid
  C-term NH2
RXIAQALRXIGDXFNAXYAHH

SEQ ID NO: 1080 - protein, 21 aa, Artificial Sequence
  Description of Artificial Sequence: Synthetic peptide
  MOD_RES (2)..(2): (S)-2-amino-3-(6,7-dimethoxy-2-oxo-2H-chromene-3- carboxamido)propanoic acid
  MOD_RES (9)..(9): Alpha-Me R-azide 1,5 triazole (3 carbon) amino acid
  MISC_FEATURE (9)..(13): Crosslink between residues
  MOD_RES (13)..(13): 2-amino-2-(pent-4-yn-1-yl)hept-6-ynoic acid after Ru-catalyzed cycloaddition
  MISC_FEATURE (13)..(17): Crosslink between residues
  MOD_RES (17)..(17): Alpha-Me azide 1,5 triazole (3 carbon) amino acid
  C-term NH2
RXIAQALRXIGDXFNAXYAHH

SEQ ID NO: 1081 - protein, 22 aa, Artificial Sequence
  Description of Artificial Sequence: Synthetic peptide
  N-term 5-FAM
  MOD_RES (1)..(1): Beta-Ala
  MOD_RES (10)..(10): Alpha-Me R5-pentenyl-alanine olefin amino acid connected by an all-carbon crosslinker comprising one double bond
  MISC_FEATURE (10)..(14): Crosslink between residues
  MOD_RES (14)..(14): Two pentenyl-alanine olefin side chains, each of which is crosslinked to another amino acid as indicated
  MISC_FEATURE (14)..(18): Crosslink between residues
  MOD_RES (18)..(18): Alpha-Me S5-pentenyl-alanine olefin amino acid connected by an all-carbon crosslinker comprising one double bond
  C-term NH2
ARWIAQALRAIGDAFNAAYAHH

SEQ ID NO: 1082 - protein, 21 aa, Artificial Sequence
  Description of Artificial Sequence: Synthetic peptide
  N-term Ac
  MOD_RES (2)..(2): (S)-2-amino-3-(7-(diethylamino)-2-oxo-2H-chromene-3- carboxamido)propanoic acid
  MOD_RES (9)..(9): 2-aminoisobutyric acid
  MOD_RES (13)..(13): 2-aminoisobutyric acid
  MOD_RES (17)..(17): 2-aminoisobutyric acid
  C-term NH2
RXIAQQLRXIGDXFNAXYAHH

SEQ ID NO: 1083 - protein, 21 aa, Artificial Sequence
  Description of Artificial Sequence: Synthetic peptide
  N-term Ac
  MOD_RES (9)..(9): 2-aminoisobutyric acid
  MOD_RES (13)..(13): 2-aminoisobutyric acid
  MOD_RES (17)..(17): 2-aminoisobutyric acid
  C-term NH2
RWIAQQLRXIGDXFNAXYAHH

SEQ ID NO: 1084 - protein, 21 aa, Artificial Sequence
  Description of Artificial Sequence: Synthetic peptide
  N-term Ac
  MOD_RES (2)..(2): (S)-2-amino-3-(7-(diethylamino)-2-oxo-2H-chromene-3- carboxamido)propanoic acid
  MOD_RES (9)..(9): Alpha-Me R5-pentenyl-alanine olefin amino acid connected by an all-carbon crosslinker comprising one double bond
  MISC_FEATURE (9)..(13): Crosslink between residues
  MOD_RES (13)..(13): Two pentenyl-alanine olefin side chains, each of which is crosslinked to another amino acid as indicated
  MISC_FEATURE (13)..(17): Crosslink between residues
  MOD_RES (17)..(17): Alpha-Me S5-pentenyl-alanine olefin amino acid connected by an all-carbon crosslinker comprising one double bond
  C-term NH2
RXIAQELRAIGDAFNAAYAHH

SEQ ID NO: 1085 - protein, 21 aa, Artificial Sequence
  Description of Artificial Sequence: Synthetic peptide
  N-term Ac
  MOD_RES (9)..(9): Alpha-Me R5-pentenyl-alanine olefin amino acid connected by an all-carbon crosslinker comprising one double bond
  MISC_FEATURE (9)..(13): Crosslink between residues
  MOD_RES (13)..(13): Two pentenyl-alanine olefin side chains, each of which is crosslinked to another amino acid as indicated
  MISC_FEATURE (13)..(17): Crosslink between residues
  MOD_RES (17)..(17): Alpha-Me S5-pentenyl-alanine olefin amino acid connected by an all-carbon crosslinker comprising one double bond
  C-term NH2
RWIAQELRAIGDAFNAAYAHH

SEQ ID NO: 1086 - protein, 21 aa, Artificial Sequence
  Description of Artificial Sequence: Synthetic peptide
  N-term Ac
  MOD_RES (2)..(2): (S)-2-amino-3-(7-(diethylamino)-2-oxo-2H-chromene-3- carboxamido)propanoic acid
  MOD_RES (9)..(9): Alpha-Me S5-pentenyl-alanine olefin amino acid connected by an all-carbon crosslinker comprising one double bond
  MISC_FEATURE (9)..(13): Crosslink between residues
  MOD_RES (13)..(13): Alpha-Me S5-pentenyl-alanine olefin amino acid connected by an all-carbon crosslinker comprising one double bond
  C-term NH2
IXIAQELRAIGDAFNAYYARR

SEQ ID NO: 1087 - protein, 21 aa, Artificial Sequence
  Description of Artificial Sequence: Synthetic peptide
  N-term Ac
  MOD_RES (9)..(9): Alpha-Me alkyne 1,5 triazole (5 carbon) amino acid comprising a methyl at the 4-position
  MISC_FEATURE (9)..(13): Crosslink between residues
  MOD_RES (13)..(13): Alpha-Me azide 1,5 triazole (3 carbon) amino acid
  MOD_RES (16)..(16): 2-aminoisobutyric acid
  C-term NH2
IWIAQALRXIGDXFNXFYAHH

SEQ ID NO: 1088 - protein, 21 aa, Artificial Sequence
  Description of Artificial Sequence: Synthetic peptide
  N-term Ac
  MOD_RES (9)..(9): Alpha-Me alkyne 1,5 triazole (5 carbon) amino acid comprising a phenyl at the 4-position
  MISC_FEATURE (9)..(13): Crosslink between residues
  MOD_RES (13)..(13): Alpha-Me azide 1,5 triazole (3 carbon) amino acid
  MOD_RES (16)..(16): 2-aminoisobutyric acid
  C-term NH2
IWIAQALRXIGDXFNXFYAHH

SEQ ID NO: 1089 - protein, 21 aa, Artificial Sequence
  Description of Artificial Sequence: Synthetic peptide
  N-term Ac
  MOD_RES (1)..(1): Norleucine
  MOD_RES (9)..(9): Alpha-Me R5-pentenyl-alanine olefin amino acid connected by an all-carbon crosslinker comprising one double bond
  MISC_FEATURE (9)..(13): Crosslink between residues
  MOD_RES (13)..(13): Two pentenyl-alanine olefin side chains, each of which is crosslinked to another amino acid as indicated
  MISC_FEATURE (13)..(17): Crosslink between residues
  MOD_RES (17)..(17): Alpha-Me S5-pentenyl-alanine olefin amino acid connected by an all-carbon crosslinker comprising one double bond
  C-term NH2
LWIAQALRAIGDAFNAAYAHH

SEQ ID NO: 1090 - protein, 21 aa, Artificial Sequence
  Description of Artificial Sequence: Synthetic peptide
  N-term Ac
  MOD_RES (9)..(9): Alpha-Me R5-pentenyl-alanine olefin amino acid connected by an all-carbon crosslinker comprising one double bond
  MISC_FEATURE (9)..(13): Crosslink between residues
  MOD_RES (13)..(13): Two pentenyl-alanine olefin side chains, each of which is crosslinked to another amino acid as indicated
  MISC_FEATURE (13)..(17): Crosslink between residues
  MOD_RES (17)..(17): Alpha-Me S5-pentenyl-alanine olefin amino acid connected by an all-carbon crosslinker comprising one double bond
  C-term NH2
KWIAQALRAIGDAFNAAYAHH

SEQ ID NO: 1091 - protein, 21 aa, Artificial Sequence
  Description of Artificial Sequence: Synthetic peptide
  N-term Ac
  MOD_RES (9)..(9): Alpha-Me R5-pentenyl-alanine olefin amino acid connected by an all-carbon crosslinker comprising one double bond
  MISC_FEATURE (9)..(13): Crosslink between residues
  MOD_RES (13)..(13): Two pentenyl-alanine olefin side chains, each of which is crosslinked to another amino acid as indicated
  MISC_FEATURE (13)..(17): Crosslink between residues
  MOD_RES (17)..(17): Alpha-Me S5-pentenyl-alanine olefin amino acid connected by an all-carbon crosslinker comprising one double bond
  C-term NH2
RWIAQALRAIGDAFNAAYQHH

SEQ ID NO: 1092 - protein, 21 aa, Artificial Sequence
  Description of Artificial Sequence: Synthetic peptide
  N-term Ac
  MOD_RES (9)..(9): Alpha-Me R5-pentenyl-alanine olefin amino acid connected by an all-carbon crosslinker comprising one double bond
  MISC_FEATURE (9)..(13): Crosslink between residues
  MOD_RES (13)..(13): Two pentenyl-alanine olefin side chains, each of which is crosslinked to another amino acid as indicated
  MISC_FEATURE (13)..(17): Crosslink between residues
  MOD_RES (17)..(17): Alpha-Me S5-pentenyl-alanine olefin amino acid connected by an all-carbon crosslinker comprising one double bond
  C-term NH2
IWIAQALRAIGDAFNAAYQHH

SEQ ID NO: 1093 - protein, 21 aa, Artificial Sequence
  Description of Artificial Sequence: Synthetic peptide
  N-term Ac
  MOD_RES (1)..(1): Norleucine
  MOD_RES (2)..(2): (S)-2-amino-3-(7-(diethylamino)-2-oxo-2H-chromene-3- carboxamido)propanoic acid
  MOD_RES (9)..(9): Alpha-Me R5-pentenyl-alanine olefin amino acid connected by an all-carbon crosslinker comprising one double bond
  MISC_FEATURE (9)..(13): Crosslink between residues
  MOD_RES (13)..(13): Two pentenyl-alanine olefin side chains, each of which is crosslinked to another amino acid as indicated
  MISC_FEATURE (13)..(17): Crosslink between residues
  MOD_RES (17)..(17): Alpha-Me S5-pentenyl-alanine olefin amino acid connected by an all-carbon crosslinker comprising one double bond
  C-term NH2
LXIAQALRAIGDAFNAAYAHH

SEQ ID NO: 1094 - protein, 21 aa, Artificial Sequence
  Description of Artificial Sequence: Synthetic peptide
  N-term Ac
  MOD_RES (2)..(2): (S)-2-amino-3-(7-(diethylamino)-2-oxo-2H-chromene-3- carboxamido)propanoic acid
  MOD_RES (9)..(9): Alpha-Me R5-pentenyl-alanine olefin amino acid connected by an all-carbon crosslinker comprising one double bond
  MISC_FEATURE (9)..(13): Crosslink between residues
  MOD_RES (13)..(13): Two pentenyl-alanine olefin side chains, each of which is crosslinked to another amino acid as indicated
  MISC_FEATURE (13)..(17): Crosslink between residues
  MOD_RES (17)..(17): Alpha-Me S5-pentenyl-alanine olefin amino acid connected by an all-carbon crosslinker comprising one double bond
  C-term NH2
KXIAQALRAIGDAFNAAYAHH

SEQ ID NO: 1095 - protein, 21 aa, Artificial Sequence
  Description of Artificial Sequence: Synthetic peptide
  N-term Ac
  MOD_RES (15)..(15): Alpha-Me S5-pentenyl-alanine olefin amino acid connected by an all-carbon crosslinker comprising one double bond
  MISC_FEATURE (15)..(19): Crosslink between residues
  MOD_RES (19)..(19): Alpha-Me S5-pentenyl-alanine olefin amino acid connected by an all-carbon crosslinker comprising one double bond
  C-term NH2
IWIAQELRRIGDEFAAYYARR

SEQ ID NO: 1096 - protein, 21 aa, Artificial Sequence
  Description of Artificial Sequence: Synthetic peptide
  N-term Ac
  MOD_RES (16)..(16): Alpha-Me S5-pentenyl-alanine olefin amino acid connected by an all-carbon crosslinker comprising one double bond
  MISC_FEATURE (16)..(20): Crosslink between residues
  MOD_RES (20)..(20): Alpha-Me S5-pentenyl-alanine olefin amino acid connected by an all-carbon crosslinker comprising one double bond
  C-term NH2
IWIAQELRRIGDEFNAYYAAR

SEQ ID NO: 1097 - protein, 21 aa, Artificial Sequence
  Description of Artificial Sequence: Synthetic peptide
  N-term Ac
  MOD_RES (8)..(8): Alpha-Me R8-octenyl-alanine olefin amino acid connected by an all-carbon crosslinker comprising one double bond
  MISC_FEATURE (8)..(15): Crosslink between residues
  MOD_RES (15)..(15): Alpha-Me S5-pentenyl-alanine olefin amino acid connected by an all-carbon crosslinker comprising one double bond
  C-term NH2
IWIAQELARIGDEFAAYYARR

SEQ ID NO: 1098 - protein, 21 aa, Artificial Sequence
  Description of Artificial Sequence: Synthetic peptide
  N-term Ac
  MOD_RES (9)..(9): Alpha-Me R8-octenyl-alanine olefin amino acid connected by an all-carbon crosslinker comprising one double bond
  MISC_FEATURE (9)..(16): Crosslink between residues
  MOD_RES (16)..(16): Alpha-Me S5-pentenyl-alanine olefin amino acid connected by an all-carbon crosslinker comprising one double bond
  C-term NH2
IWIAQELRAIGDEFNAYYARR

SEQ ID NO: 1099 - protein, 21 aa, Artificial Sequence
  Description of Artificial Sequence: Synthetic peptide
  N-term Ac
  MOD_RES (13)..(13): Alpha-Me R8-octenyl-alanine olefin amino acid connected by an all-carbon crosslinker comprising one double bond
  MISC_FEATURE (13)..(20): Crosslink between residues
  MOD_RES (20)..(20): Alpha-Me S5-pentenyl-alanine olefin amino acid connected by an all-carbon crosslinker comprising one double bond
  C-term NH2
IWIAQELRRIGDAFNAYYAAR

SEQ ID NO: 1100 - protein, 21 aa, Artificial Sequence
  Description of Artificial Sequence: Synthetic peptide
  N-term Ac
  MOD_RES (2)..(2): Alpha-Me S5-pentenyl-alanine olefin amino acid connected by an all-carbon crosslinker comprising one double bond
  MISC_FEATURE (2)..(6): Crosslink between residues
  MOD_RES (6)..(6): Two pentenyl-alanine olefin side chains, each of which is crosslinked to another amino acid as indicated
  MISC_FEATURE (6)..(13): Crosslink between residues
  MOD_RES (13)..(13): Alpha-Me S8-octenyl-alanine olefin amino acid connected by an all-carbon crosslinker comprising one double bond
  C-term NH2
IAIAQALRRIGDAFNAYYARR

SEQ ID NO: 1101 - protein, 21 aa, Artificial Sequence
  Description of Artificial Sequence: Synthetic peptide
  N-term Ac
  MOD_RES (2)..(2): Alpha-Me R8-octenyl-alanine olefin amino acid connected by an all-carbon crosslinker comprising one double bond
  MISC_FEATURE (2)..(9): Crosslink between residues
  MOD_RES (9)..(9): Two pentenyl-alanine olefin side chains, each of which is crosslinked to another amino acid as indicated
  MISC_FEATURE (9)..(13): Crosslink between residues
  MOD_RES (13)..(13): Alpha-Me R5-pentenyl-alanine olefin amino acid connected by an all-carbon crosslinker comprising one double bond
  C-term NH2
IAIAQELRAIGDAFNAYYARR

SEQ ID NO: 1102 - protein, 21 aa, Artificial Sequence
  Description of Artificial Sequence: Synthetic peptide
  N-term Ac
  MOD_RES (2)..(2): Alpha-Me R8-octenyl-alanine olefin amino acid connected by an all-carbon crosslinker comprising one double bond
  MISC_FEATURE (2)..(9): Crosslink between residues
  MOD_RES (9)..(9): Two pentenyl-alanine olefin side chains, each of which is crosslinked to another amino acid as indicated
  MISC_FEATURE (9)..(16): Crosslink between residues
  MOD_RES (16)..(16): Alpha-Me S8-octenyl-alanine olefin amino acid connected by an all-carbon crosslinker comprising one double bond
  C-term NH2
IAIAQELRAIGDEFNAYYARR

SEQ ID NO: 1103 - protein, 21 aa, Artificial Sequence
  Description of Artificial Sequence: Synthetic peptide
  N-term Ac
  MOD_RES (4)..(4): Alpha-Me S5-pentenyl-alanine olefin amino acid connected by an all-carbon crosslinker comprising one double bond
  MISC_FEATURE (4)..(8): Crosslink between residues
  MOD_RES (8)..(8): Two pentenyl-alanine olefin side chains, each of which is crosslinked to another amino acid as indicated
  MISC_FEATURE (8)..(15): Crosslink between residues
  MOD_RES (15)..(15): Alpha-Me S8-octenyl-alanine olefin amino acid connected by an all-carbon crosslinker comprising one double bond
  C-term NH2
IWIAQELARIGDEFAAYYARR

SEQ ID NO: 1104 - protein, 21 aa, Artificial Sequence
  Description of Artificial Sequence: Synthetic peptide
  N-term Ac
  MOD_RES (5)..(5): Alpha-Me S5-pentenyl-alanine olefin amino acid connected by an all-carbon crosslinker comprising one double bond
  MISC_FEATURE (5)..(9): Crosslink between residues
  MOD_RES (9)..(9): Two pentenyl-alanine olefin side chains, each of which is crosslinked to another amino acid as indicated
  MISC_FEATURE (9)..(13): Crosslink between residues
  MOD_RES (13)..(13): Alpha-Me R5-pentenyl-alanine olefin amino acid connected by an all-carbon crosslinker comprising one double bond
  C-term NH2
IWIAAELRAIGDAFNAYYARR

SEQ ID NO: 1105 - protein, 21 aa, Artificial Sequence
  Description of Artificial Sequence: Synthetic peptide
  N-term Ac
  MOD_RES (5)..(5): Alpha-Me R5-pentenyl-alanine olefin amino acid connected by an all-carbon crosslinker comprising one double bond
  MISC_FEATURE (5)..(9): Crosslink between residues
  MOD_RES (9)..(9): Two pentenyl-alanine olefin side chains, each of which is crosslinked to another amino acid as indicated
  MISC_FEATURE (9)..(13): Crosslink between residues
  MOD_RES (13)..(13): Alpha-Me S5-pentenyl-alanine olefin amino acid connected by an all-carbon crosslinker comprising one double bond
  C-term NH2
IWIAAELRAIGDAFNAYYARR

SEQ ID NO: 1106 - protein, 21 aa, Artificial Sequence
  Description of Artificial Sequence: Synthetic peptide
  N-term Ac
  MOD_RES (5)..(5): Alpha-Me S5-pentenyl-alanine olefin amino acid connected by an all-carbon crosslinker comprising one double bond
  MISC_FEATURE (5)..(9): Crosslink between residues
  MOD_RES (9)..(9): Two pentenyl-alanine olefin side chains, each of which is crosslinked to another amino acid as indicated
  MISC_FEATURE (9)..(16): Crosslink between residues
  MOD_RES (16)..(16): Alpha-Me S8-octenyl-alanine olefin amino acid connected by an all-carbon crosslinker comprising one double bond
  C-term NH2
IWIAAELRAIGDEFNAYYARR

SEQ ID NO: 1107 - protein, 21 aa, Artificial Sequence
  Description of Artificial Sequence: Synthetic peptide
  N-term Ac
  MOD_RES (6)..(6): Alpha-Me R8-octenyl-alanine olefin amino acid connected by an all-carbon crosslinker comprising one double bond
  MISC_FEATURE (6)..(13): Crosslink between residues
  MOD_RES (13)..(13): Two pentenyl-alanine olefin side chains, each of which is crosslinked to another amino acid as indicated
  MISC_FEATURE (13)..(20): Crosslink between residues
  MOD_RES (20)..(20): Alpha-Me S8-octenyl-alanine olefin amino acid connected by an all-carbon crosslinker comprising one double bond
  C-term NH2
IWIAQALRRIGDAFNAYYAAR

SEQ ID NO: 1108 - protein, 21 aa, Artificial Sequence
  Description of Artificial Sequence: Synthetic peptide
  N-term Ac
  MOD_RES (8)..(8): Alpha-Me R8-octenyl-alanine olefin amino acid connected by an all-carbon crosslinker comprising one double bond
  MISC_FEATURE (8)..(15): Crosslink between residues
  MOD_RES (15)..(15): Two pentenyl-alanine olefin side chains, each of which is crosslinked to another amino acid as indicated
  MISC_FEATURE (15)..(19): Crosslink between residues
  MOD_RES (19)..(19): Alpha-Me R5-pentenyl-alanine olefin amino acid connected by an all-carbon crosslinker comprising one double bond
  C-term NH2
IWIAQELARIGDEFAAYYARR

SEQ ID NO: 1109 - protein, 21 aa, Artificial Sequence
  Description of Artificial Sequence: Synthetic peptide
  N-term Ac
  MOD_RES (9)..(9): Alpha-Me S5-pentenyl-alanine olefin amino acid connected by an all-carbon crosslinker comprising one double bond
  MISC_FEATURE (9)..(13): Crosslink between residues
  MOD_RES (13)..(13): Two pentenyl-alanine olefin side chains, each of which is crosslinked to another amino acid as indicated
  MISC_FEATURE (13)..(20): Crosslink between residues
  MOD_RES (20)..(20): Alpha-Me S8-octenyl-alanine olefin amino acid connected by an all-carbon crosslinker comprising one double bond
  C-term NH2
IWIAQELRAIGDAFNAYYAAR

SEQ ID NO: 1110 - protein, 21 aa, Artificial Sequence
  Description of Artificial Sequence: Synthetic peptide
  N-term Ac
  MOD_RES (9)..(9): Alpha-Me R8-octenyl-alanine olefin amino acid connected by an all-carbon crosslinker comprising one double bond
  MISC_FEATURE (9)..(16): Crosslink between residues
  MOD_RES (16)..(16): Two pentenyl-alanine olefin side chains, each of which is crosslinked to another amino acid as indicated
  MISC_FEATURE (16)..(20): Crosslink between residues
  MOD_RES (20)..(20): Alpha-Me R5-pentenyl-alanine olefin amino acid connected by an all-carbon crosslinker comprising one double bond
  C-term NH2
IWIAQELRAIGDEFNAYYAAR

SEQ ID NO: 1111 - protein, 21 aa, Artificial Sequence
  Description of Artificial Sequence: Synthetic peptide
  N-term Ac
  MOD_RES (2)..(2): Alpha-Me S5-pentenyl-alanine olefin amino acid connected by an all-carbon crosslinker comprising one double bond
  MISC_FEATURE (2)..(6): Crosslink between residues
  MOD_RES (6)..(6): Alpha-Me S5-pentenyl-alanine olefin amino acid connected by an all-carbon crosslinker comprising one double bond
  MOD_RES (15)..(15): Alpha-Me S5-pentenyl-alanine olefin amino acid connected by an all-carbon crosslinker comprising one double bond
  MISC_FEATURE (15)..(19): Crosslink between residues
  MOD_RES (19)..(19): Alpha-Me S5-pentenyl-alanine olefin amino acid connected by an all-carbon crosslinker comprising one double bond
  C-term NH2
IAIAQALRRIGDEFAAYYARR

SEQ ID NO: 1112 - protein, 21 aa, Artificial Sequence
  Description of Artificial Sequence: Synthetic peptide
  N-term Ac
  MOD_RES (2)..(2): Alpha-Me S5-pentenyl-alanine olefin amino acid connected by an all-carbon crosslinker comprising one double bond
  MISC_FEATURE (2)..(6): Crosslink between residues
  MOD_RES (6)..(6): Alpha-Me S5-pentenyl-alanine olefin amino acid connected by an all-carbon crosslinker comprising one double bond
  MOD_RES (16)..(16): Alpha-Me S5-pentenyl-alanine olefin amino acid connected by an all-carbon crosslinker comprising one double bond
  MISC_FEATURE (16)..(20): Crosslink between residues
  MOD_RES (20)..(20): Alpha-Me S5-pentenyl-alanine olefin amino acid connected by an all-carbon crosslinker comprising one double bond
  C-term NH2
IAIAQALRRIGDEFNAYYAAR

SEQ ID NO: 1113 - protein, 21 aa, Artificial Sequence
  Description of Artificial Sequence: Synthetic peptide
  N-term Ac
  MOD_RES (4)..(4): Alpha-Me S5-pentenyl-alanine olefin amino acid connected by an all-carbon crosslinker comprising one double bond
  MISC_FEATURE (4)..(8): Crosslink between residues
  MOD_RES (8)..(8): Alpha-Me S5-pentenyl-alanine olefin amino acid connected by an all-carbon crosslinker comprising one double bond
  MOD_RES (15)..(15): Alpha-Me S5-pentenyl-alanine olefin amino acid connected by an all-carbon crosslinker comprising one double bond
  MISC_FEATURE (15)..(19): Crosslink between residues
  MOD_RES (19)..(19): Alpha-Me S5-pentenyl-alanine olefin amino acid connected by an all-carbon crosslinker comprising one double bond
  C-term NH2
IWIAQELARIGDEFAAYYARR

SEQ ID NO: 1114 - protein, 21 aa, Artificial Sequence
  Description of Artificial Sequence: Synthetic peptide
  N-term Ac
  MOD_RES (4)..(4): Alpha-Me S5-pentenyl-alanine olefin amino acid connected by an all-carbon crosslinker comprising one double bond
  MISC_FEATURE (4)..(8): Crosslink between residues
  MOD_RES (8)..(8): Alpha-Me S5-pentenyl-alanine olefin amino acid connected by an all-carbon crosslinker comprising one double bond
  MOD_RES (16)..(16): Alpha-Me S5-pentenyl-alanine olefin amino acid connected by an all-carbon crosslinker comprising one double bond
  MISC_FEATURE (16)..(20): Crosslink between residues
  MOD_RES (20)..(20): Alpha-Me S5-pentenyl-alanine olefin amino acid connected by an all-carbon crosslinker comprising one double bond
  C-term NH2
IWIAQELARIGDEFNAYYAAR

SEQ ID NO: 1115 - protein, 21 aa, Artificial Sequence
  Description of Artificial Sequence: Synthetic peptide
  N-term Ac
  MOD_RES (5)..(5): Alpha-Me S5-pentenyl-alanine olefin amino acid connected by an all-carbon crosslinker comprising one double bond
  MISC_FEATURE (5)..(9): Crosslink between residues
  MOD_RES (9)..(9): Alpha-Me S5-pentenyl-alanine olefin amino acid connected by an all-carbon crosslinker comprising one double bond
  MOD_RES (15)..(15): Alpha-Me S5-pentenyl-alanine olefin amino acid connected by an all-carbon crosslinker comprising one double bond
  MISC_FEATURE (15)..(19): Crosslink between residues
  MOD_RES (19)..(19): Alpha-Me S5-pentenyl-alanine olefin amino acid connected by an all-carbon crosslinker comprising one double bond
  C-term NH2
IWIAAELRAIGDEFAAYYARR

SEQ ID NO: 1116 - protein, 21 aa, Artificial Sequence
  Description of Artificial Sequence: Synthetic peptide
  N-term Ac
  MOD_RES (5)..(5): Alpha-Me S5-pentenyl-alanine olefin amino acid connected by an all-carbon crosslinker comprising one double bond
  MISC_FEATURE (5)..(9): Crosslink between residues
  MOD_RES (9)..(9): Alpha-Me S5-pentenyl-alanine olefin amino acid connected by an all-carbon crosslinker comprising one double bond
  MOD_RES (16)..(16): Alpha-Me S5-pentenyl-alanine olefin amino acid connected by an all-carbon crosslinker comprising one double bond
  MISC_FEATURE (16)..(20): Crosslink between residues
  MOD_RES (20)..(20): Alpha-Me S5-pentenyl-alanine olefin amino acid connected by an all-carbon crosslinker comprising one double bond
  C-term NH2
IWIAAELRAIGDEFNAYYAAR

SEQ ID NO: 1117 - protein, 21 aa, Artificial Sequence
  Description of Artificial Sequence: Synthetic peptide
  N-term Ac
  MOD_RES (2)..(2): Alpha-Me R8-octenyl-alanine olefin amino acid connected by an all-carbon crosslinker comprising one double bond
  MISC_FEATURE (2)..(9): Crosslink between residues
  MOD_RES (9)..(9): Alpha-Me S5-pentenyl-alanine olefin amino acid connected by an all-carbon crosslinker comprising one double bond
  MOD_RES (15)..(15): Alpha-Me S5-pentenyl-alanine olefin amino acid connected by an all-carbon crosslinker comprising one double bond
  MISC_FEATURE (15)..(19): Crosslink between residues
  MOD_RES (19)..(19): Alpha-Me S5-pentenyl-alanine olefin amino acid connected by an all-carbon crosslinker comprising one double bond
  C-term NH2
IAIAQELRAIGDEFAAYYARR

SEQ ID NO: 1118 - protein, 21 aa, Artificial Sequence
  Description of Artificial Sequence: Synthetic peptide
  N-term Ac
  MOD_RES (2)..(2): Alpha-Me R8-octenyl-alanine olefin amino acid connected by an all-carbon crosslinker comprising one double bond
  MISC_FEATURE (2)..(9): Crosslink between residues
  MOD_RES (9)..(9): Alpha-Me S5-pentenyl-alanine olefin amino acid connected by an all-carbon crosslinker comprising one double bond
  MOD_RES (16)..(16): Alpha-Me S5-pentenyl-alanine olefin amino acid connected by an all-carbon crosslinker comprising one double bond
  MISC_FEATURE (16)..(20): Crosslink between residues
  MOD_RES (20)..(20): Alpha-Me S5-pentenyl-alanine olefin amino acid connected by an all-carbon crosslinker comprising one double bond
  C-term NH2
IAIAQELRAIGDEFNAYYAAR

SEQ ID NO: 1119 - protein, 21 aa, Artificial Sequence
  Description of Artificial Sequence: Synthetic peptide
  N-term Ac
  MOD_RES (6)..(6): Alpha-Me R8-octenyl-alanine olefin amino acid connected by an all-carbon crosslinker comprising one double bond
  MISC_FEATURE (6)..(13): Crosslink between residues
  MOD_RES (13)..(13): Alpha-Me S5-pentenyl-alanine olefin amino acid connected by an all-carbon crosslinker comprising one double bond
  MOD_RES (15)..(15): Alpha-Me S5-pentenyl-alanine olefin amino acid connected by an all-carbon crosslinker comprising one double bond
  MISC_FEATURE (15)..(19): Crosslink between residues
  MOD_RES (19)..(19): Alpha-Me S5-pentenyl-alanine olefin amino acid connected by an all-carbon crosslinker comprising one double bond
  C-term NH2
IWIAQALRRIGDAFAAYYARR

SEQ ID NO: 1120 - protein, 21 aa, Artificial Sequence
  Description of Artificial Sequence: Synthetic peptide
  N-term Ac
  MOD_RES (6)..(6): Alpha-Me R8-octenyl-alanine olefin amino acid connected by an all-carbon crosslinker comprising one double bond
  MISC_FEATURE (6)..(13): Crosslink between residues
  MOD_RES (13)..(13): Alpha-Me S5-pentenyl-alanine olefin amino acid connected by an all-carbon crosslinker comprising one double bond
  MOD_RES (16)..(16): Alpha-Me S5-pentenyl-alanine olefin amino acid connected by an all-carbon crosslinker comprising one double bond
  MISC_FEATURE (16)..(20): Crosslink between residues
  MOD_RES (20)..(20): Alpha-Me S5-pentenyl-alanine olefin amino acid connected by an all-carbon crosslinker comprising one double bond
  C-term NH2
IWIAQALRRIGDAFNAYYAAR

SEQ ID NO: 1121 - protein, 21 aa, Artificial Sequence
  Description of Artificial Sequence: Synthetic peptide
  N-term Ac
  MOD_RES (2)..(2): Alpha-Me S5-pentenyl-alanine olefin amino acid connected by an all-carbon crosslinker comprising one double bond
  MISC_FEATURE (2)..(6): Crosslink between residues
  MOD_RES (6)..(6): Alpha-Me S5-pentenyl-alanine olefin amino acid connected by an all-carbon crosslinker comprising one double bond
  MOD_RES (8)..(8): Alpha-Me R8-octenyl-alanine olefin amino acid connected by an all-carbon crosslinker comprising one double bond
  MISC_FEATURE (8)..(15): Crosslink between residues
  MOD_RES (15)..(15): Alpha-Me S5-pentenyl-alanine olefin amino acid connected by an all-carbon crosslinker comprising one double bond
  C-term NH2
IAIAQALARIGDEFAAYYARR

SEQ ID NO: 1122 - protein, 21 aa, Artificial Sequence
  Description of Artificial Sequence: Synthetic peptide
  N-term Ac
  MOD_RES (2)..(2): Alpha-Me S5-pentenyl-alanine olefin amino acid connected by an all-carbon crosslinker comprising one double bond
  MISC_FEATURE (2)..(6): Crosslink between residues
  MOD_RES (6)..(6): Alpha-Me S5-pentenyl-alanine olefin amino acid connected by an all-carbon crosslinker comprising one double bond
  MOD_RES (9)..(9): Alpha-Me R8-octenyl-alanine olefin amino acid connected by an all-carbon crosslinker comprising one double bond
  MISC_FEATURE (9)..(16): Crosslink between residues
  MOD_RES (16)..(16): Alpha-Me S5-pentenyl-alanine olefin amino acid connected by an all-carbon crosslinker comprising one double bond
  C-term NH2
IAIAQALRAIGDEFNAYYARR

SEQ ID NO: 1123 - protein, 21 aa, Artificial Sequence
  Description of Artificial Sequence: Synthetic peptide
  N-term Ac
  MOD_RES (2)..(2): Alpha-Me S5-pentenyl-alanine olefin amino acid connected by an all-carbon crosslinker comprising one double bond
  MISC_FEATURE (2)..(6): Crosslink between residues
  MOD_RES (6)..(6): Alpha-Me S5-pentenyl-alanine olefin amino acid connected by an all-carbon crosslinker comprising one double bond
  MOD_RES (13)..(13): Alpha-Me R8-octenyl-alanine olefin amino acid connected by an all-carbon crosslinker comprising one double bond
  MISC_FEATURE (13)..(20): Crosslink between residues
  MOD_RES (20)..(20): Alpha-Me S5-pentenyl-alanine olefin amino acid connected by an all-carbon crosslinker comprising one double bond
  C-term NH2
IAIAQALRRIGDAFNAYYAAR

SEQ ID NO: 1124 - protein, 21 aa, Artificial Sequence
  Description of Artificial Sequence: Synthetic peptide
  N-term Ac
  MOD_RES (4)..(4): Alpha-Me S5-pentenyl-alanine olefin amino acid connected by an all-carbon crosslinker comprising one double bond
  MISC_FEATURE (4)..(8): Crosslink between residues
  MOD_RES (8)..(8): Alpha-Me S5-pentenyl-alanine olefin amino acid connected by an all-carbon crosslinker comprising one double bond
  MOD_RES (13)..(13): Alpha-Me R8-octenyl-alanine olefin amino acid connected by an all-carbon crosslinker comprising one double bond
  MISC_FEATURE (13)..(20): Crosslink between residues
  MOD_RES (20)..(20): Alpha-Me S5-pentenyl-alanine olefin amino acid connected by an all-carbon crosslinker comprising one double bond
  C-term NH2
IWIAQELARIGDAFNAYYAAR

SEQ ID NO: 1125 - protein, 21 aa, Artificial Sequence
  Description of Artificial Sequence: Synthetic peptide
  N-term Ac
  MOD_RES (5)..(5): Alpha-Me S5-pentenyl-alanine olefin amino acid connected by an all-carbon crosslinker comprising one double bond
  MISC_FEATURE (5)..(9): Crosslink between residues
  MOD_RES (9)..(9): Alpha-Me S5-pentenyl-alanine olefin amino acid connected by an all-carbon crosslinker comprising one double bond
  MOD_RES (13)..(13): Alpha-Me R8-octenyl-alanine olefin amino acid connected by an all-carbon crosslinker comprising one double bond
  MISC_FEATURE (13)..(20): Crosslink between residues
  MOD_RES (20)..(20): Alpha-Me S5-pentenyl-alanine olefin amino acid connected by an all-carbon crosslinker comprising one double bond
  C-term NH2
IWIAAELRAIGDAFNAYYAAR

SEQ ID NO: 1126 - protein, 22 aa, Artificial Sequence
  Description of Artificial Sequence: Synthetic peptide
  N-term 5-FAM
  MOD_RES (1)..(1): Beta-Ala
  C-term NH2
AIWIAQELRRIGDEFNAYYARR

SEQ ID NO: 1127 - protein, 22 aa, Artificial Sequence
  Description of Artificial Sequence: Synthetic peptide
  N-term 5-FAM
  MOD_RES (1)..(1): Beta-Ala
  MOD_RES (10)..(10): Alpha-Me S5-pentenyl-alanine olefin amino acid connected by an all-carbon crosslinker comprising one double bond
  MISC_FEATURE (10)..(14): Crosslink between residues
  MOD_RES (14)..(14): Alpha-Me S5-pentenyl-alanine olefin amino acid connected by an all-carbon crosslinker comprising one double bond
  C-term NH2
AIWIAQELRAIGDAFNAYYARR

SEQ ID NO: 1128 - protein, 26 aa, Artificial Sequence
  Description of Artificial Sequence: Synthetic peptide
  N-term 5-FAM
  MOD_RES (1)..(1): Beta-Ala
  MOD_RES (15)..(15): Alpha-Me S5-pentenyl-alanine olefin amino acid connected by an all-carbon crosslinker comprising one double bond
  MISC_FEATURE (15)..(19): Crosslink between residues
  MOD_RES (16)..(16): Norleucine
  MOD_RES (19)..(19): Alpha-Me S5-pentenyl-alanine olefin amino acid connected by an all-carbon crosslinker comprising one double bond
  C-term NH2
ANLWAAQRYGRELRALSDAFVDSFKK

SEQ ID NO: 1129 - protein, 22 aa, Artificial Sequence
  Description of Artificial Sequence: Synthetic peptide
  N-term 5-FAM
  MOD_RES (1)..(1): Beta-Ala
  MOD_RES (9)..(9): Alpha-Me S5-pentenyl-alanine olefin amino acid connected by an all-carbon crosslinker comprising one double bond
  MISC_FEATURE (9)..(13): Crosslink between residues
  MOD_RES (13)..(13): Alpha-Me S5-pentenyl-alanine olefin amino acid connected by an all-carbon crosslinker comprising one double bond
  C-term NH2
AKALETLRAVGDAVQRNHETAF

SEQ ID NO: 1130 - protein, 21 aa, Artificial Sequence
  Description of Artificial Sequence: Synthetic peptide
  N-term Ac
  MOD_RES (2)..(2): (S)-2-amino-3-(7-(diethylamino)-2-oxo-2H-chromene-3- carboxamido)propanoic acid
  MOD_RES (9)..(9): Alpha-Me S5-pentenyl-alanine olefin amino acid connected by an all-carbon crosslinker comprising one double bond
  MISC_FEATURE (9)..(13): Crosslink between residues
  MOD_RES (13)..(13): Alpha-Me S5-pentenyl-alanine olefin amino acid connected by an all-carbon crosslinker comprising one double bond
  C-term NH2
RXIAQALRAIGDAFNAFYARR

SEQ ID NO: 1131 - protein, 21 aa, Artificial Sequence
  Description of Artificial Sequence: Synthetic peptide
  N-term Ac
  MOD_RES (2)..(2): (S)-2-amino-3-(7-(diethylamino)-2-oxo-2H-chromene-3- carboxamido)propanoic acid
  MOD_RES (9)..(9): Alpha-Me R-azide 1,5 triazole (3 carbon) amino acid
  MISC_FEATURE (9)..(13): Crosslink between residues
  MOD_RES (13)..(13): 2-amino-2-(pent-4-yn-1-yl)hept-6-ynoic acid after Ru-catalyzed cycloaddition
  MISC_FEATURE (13)..(17): Crosslink between residues
  MOD_RES (17)..(17): Alpha-Me azide 1,5 triazole (3 carbon) amino acid
  C-term NH2
RXIAQALRXIGDXFNAXYAHH

SEQ ID NO: 1132 - protein, 21 aa, Artificial Sequence
  Description of Artificial Sequence: Synthetic peptide
  N-term Ac
  MOD_RES (4)..(4): Alpha-Me S5-pentenyl-alanine olefin amino acid connected by an all-carbon crosslinker comprising one double bond
  MISC_FEATURE (4)..(8): Crosslink between residues
  MOD_RES (8)..(8): Alpha-Me S5-pentenyl-alanine olefin amino acid connected by an all-carbon crosslinker comprising one double bond
  MOD_RES (15)..(15): Alpha-Me S5-pentenyl-alanine olefin amino acid connected by an all-carbon crosslinker comprising one double bond
  MISC_FEATURE (15)..(19): Crosslink between residues
  MOD_RES (19)..(19): Alpha-Me S5-pentenyl-alanine olefin amino acid connected by an all-carbon crosslinker comprising one double bond
  C-term NH2
IWIAQELARIGDEFAAYYARR

SEQ ID NO: 1133 - protein, 21 aa, Artificial Sequence
  Description of Artificial Sequence: Synthetic peptide
  N-term Ac
  MOD_RES (6)..(6): Alpha-Me R8-octenyl-alanine olefin amino acid connected by an all-carbon crosslinker comprising one double bond
  MISC_FEATURE (6)..(13): Crosslink between residues
  MOD_RES (13)..(13): Alpha-Me S5-pentenyl-alanine olefin amino acid connected by an all-carbon crosslinker comprising one double bond
  MOD_RES (15)..(15): Alpha-Me S5-pentenyl-alanine olefin amino acid connected by an all-carbon crosslinker comprising one double bond
  MISC_FEATURE (15)..(19): Crosslink between residues
  MOD_RES (19)..(19): Alpha-Me S5-pentenyl-alanine olefin amino acid connected by an all-carbon crosslinker comprising one double bond
  C-term NH2
IWIAQALRRIGDAFAAYYARR

SEQ ID NO: 1134 - protein, 21 aa, Artificial Sequence
  Description of Artificial Sequence: Synthetic peptide
  N-term Ac
  MOD_RES (6)..(6): Alpha-Me R8-octenyl-alanine olefin amino acid connected by an all-carbon crosslinker comprising one double bond
  MISC_FEATURE (6)..(13): Crosslink between residues
  MOD_RES (13)..(13): Alpha-Me S5-pentenyl-alanine olefin amino acid connected by an all-carbon crosslinker comprising one double bond
  MOD_RES (16)..(16): Alpha-Me S5-pentenyl-alanine olefin amino acid connected by an all-carbon crosslinker comprising one double bond
  MISC_FEATURE (16)..(20): Crosslink between residues
  MOD_RES (20)..(20): Alpha-Me S5-pentenyl-alanine olefin amino acid connected by an all-carbon crosslinker comprising one double bond
  C-term NH2
IWIAQALRRIGDAFNAYYAAR

SEQ ID NO: 1135 - protein, 21 aa, Artificial Sequence
  Description of Artificial Sequence: Synthetic peptide
  N-term Ac
  MOD_RES (4)..(4): Alpha-Me S5-pentenyl-alanine olefin amino acid connected by an all-carbon crosslinker comprising one double bond
  MISC_FEATURE (4)..(8): Crosslink between residues
  MOD_RES (8)..(8): Alpha-Me S5-pentenyl-alanine olefin amino acid connected by an all-carbon crosslinker comprising one double bond
  MOD_RES (13)..(13): Alpha-Me R8-octenyl-alanine olefin amino acid connected by an all-carbon crosslinker comprising one double bond
  MISC_FEATURE (13)..(20): Crosslink between residues
  MOD_RES (20)..(20): Alpha-Me S5-pentenyl-alanine olefin amino acid connected by an all-carbon crosslinker comprising one double bond
  C-term NH2
IWIAQELARIGDAFNAYYAAR

SEQ ID NO: 1136 - protein, 21 aa, Artificial Sequence
  Description of Artificial Sequence: Synthetic peptide
  N-term Ac
  MOD_RES (5)..(5): Alpha-Me S5-pentenyl-alanine olefin amino acid connected by an all-carbon crosslinker comprising one double bond
  MISC_FEATURE (5)..(9): Crosslink between residues
  MOD_RES (9)..(9): Alpha-Me S5-pentenyl-alanine olefin amino acid connected by an all-carbon crosslinker comprising one double bond
  MOD_RES (13)..(13): Alpha-Me R8-octenyl-alanine olefin amino acid connected by an all-carbon crosslinker comprising one double bond
  MISC_FEATURE (13)..(20): Crosslink between residues
  MOD_RES (20)..(20): Alpha-Me S5-pentenyl-alanine olefin amino acid connected by an all-carbon crosslinker comprising one double bond
  C-term NH2
IWIAAELRAIGDAFNAYYAAR

SEQ ID NO: 1137 - protein, 21 aa, Artificial Sequence
  Description of Artificial Sequence: Synthetic peptide
  N-term Ac
  MOD_RES (4)..(4): Alpha-Me S5-pentenyl-alanine olefin amino acid connected by an all-carbon crosslinker comprising one double bond
  MISC_FEATURE (4)..(8): Crosslink between residues
  MOD_RES (8)..(8): Two pentenyl-alanine olefin side chains, each of which is crosslinked to another amino acid as indicated
  MISC_FEATURE (8)..(15): Crosslink between residues
  MOD_RES (15)..(15): Alpha-Me S8-octenyl-alanine olefin amino acid connected by an all-carbon crosslinker comprising one double bond
  C-term NH2
IWIAQELARIGDEFAAYYARR

SEQ ID NO: 1138 - protein, 21 aa, Artificial Sequence
  Description of Artificial Sequence: Synthetic peptide
  N-term Ac
  MOD_RES (6)..(6): Alpha-Me R8-octenyl-alanine olefin amino acid connected by an all-carbon crosslinker comprising one double bond
  MISC_FEATURE (6)..(13): Crosslink between residues
  MOD_RES (13)..(13): Two pentenyl-alanine olefin side chains, each of which is crosslinked to another amino acid as indicated
  MISC_FEATURE (13)..(20): Crosslink between residues
  MOD_RES (20)..(20): Alpha-Me S8-octenyl-alanine olefin amino acid connected by an all-carbon crosslinker comprising one double bond
  C-term NH2
IWIAQALRRIGDAFNAYYAAR

SEQ ID NO: 1139 - protein, 21 aa, Artificial Sequence
  Description of Artificial Sequence: Synthetic peptide
  N-term Ac
  MOD_RES (8)..(8): Alpha-Me R8-octenyl-alanine olefin amino acid connected by an all-carbon crosslinker comprising one double bond
  MISC_FEATURE (8)..(15): Crosslink between residues
  MOD_RES (15)..(15): Two pentenyl-alanine olefin side chains, each of which is crosslinked to another amino acid as indicated
  MISC_FEATURE (15)..(19): Crosslink between residues
  MOD_RES (19)..(19): Alpha-Me R5-pentenyl-alanine olefin amino acid connected by an all-carbon crosslinker comprising one double bond
  C-term NH2
IWIAQELARIGDEFAAYYARR

SEQ ID NO: 1140 - protein, 21 aa, Artificial Sequence
  Description of Artificial Sequence: Synthetic peptide
  N-term Ac
  MOD_RES (2)..(2): Alpha-Me R8-octenyl-alanine olefin amino acid connected by an all-carbon crosslinker comprising one double bond
  MISC_FEATURE (2)..(9): Crosslink between residues
  MOD_RES (9)..(9): Alpha-Me S5-pentenyl-alanine olefin amino acid connected by an all-carbon crosslinker comprising one double bond
  MOD_RES (15)..(15): Alpha-Me S5-pentenyl-alanine olefin amino acid connected by an all-carbon crosslinker comprising one double bond
  MISC_FEATURE (15)..(19): Crosslink between residues
  MOD_RES (19)..(19): Alpha-Me S5-pentenyl-alanine olefin amino acid connected by an all-carbon crosslinker comprising one double bond
  C-term NH2
IAIAQELRAIGDEFAAYYARR

SEQ ID NO: 1141 - protein, 21 aa, Artificial Sequence
  Description of Artificial Sequence: Synthetic peptide
  N-term Ac
  MOD_RES (6)..(6): Alpha-Me R8-octenyl-alanine olefin amino acid connected by an all-carbon crosslinker comprising one double bond
  MISC_FEATURE (6)..(13): Crosslink between residues
  MOD_RES (13)..(13): Alpha-Me S5-pentenyl-alanine olefin amino acid connected by an all-carbon crosslinker comprising one double bond
  C-term NH2
IWIAQALRRIGDAFNAYYARR

SEQ ID NO: 1142 - protein, 21 aa, Artificial Sequence
  Description of Artificial Sequence: Synthetic peptide
  N-term Ac
  MOD_RES (15)..(15): Alpha-Me S5-pentenyl-alanine olefin amino acid connected by an all-carbon crosslinker comprising one double bond
  MISC_FEATURE (15)..(19): Crosslink between residues
  MOD_RES (19)..(19): Alpha-Me S5-pentenyl-alanine olefin amino acid connected by an all-carbon crosslinker comprising one double bond
  C-term NH2
IWIAQELRRIGDEFAAYYARR

SEQ ID NO: 1143 - protein, 19 aa, Artificial Sequence
  Description of Artificial Sequence: Synthetic peptide
  N-term Ac
  MOD_RES (9)..(9): Alpha-Me R8-octenyl-alanine olefin amino acid connected by an all-carbon crosslinker comprising one double bond
  MISC_FEATURE (9)..(16): Crosslink between residues
  MOD_RES (16)..(16): Alpha-Me S5-pentenyl-alanine olefin amino acid connected by an all-carbon crosslinker comprising one double bond
  C-term NH2
IWIAQALRAIGDAFNAYYA

SEQ ID NO: 1144 - protein, 18 aa, Artificial Sequence
  Description of Artificial Sequence: Synthetic peptide
  N-term Ac
  MOD_RES (8)..(8): Alpha-Me R8-octenyl-alanine olefin amino acid connected by an all-carbon crosslinker comprising one double bond
  MISC_FEATURE (8)..(15): Crosslink between residues
  MOD_RES (15)..(15): Alpha-Me S5-pentenyl-alanine olefin amino acid connected by an all-carbon crosslinker comprising one double bond
  C-term NH2
WIAQALRAIGDAFNAYYA

SEQ ID NO: 1145 - protein, 17 aa, Artificial Sequence
  Description of Artificial Sequence: Synthetic peptide
  N-term Ac
  MOD_RES (7)..(7): Alpha-Me R8-octenyl-alanine olefin amino acid connected by an all-carbon crosslinker comprising one double bond
  MISC_FEATURE (7)..(14): Crosslink between residues
  MOD_RES (14)..(14): Alpha-Me S5-pentenyl-alanine olefin amino acid connected by an all-carbon crosslinker comprising one double bond
  C-term NH2
IAQALRAIGDAFNAYYA

SEQ ID NO: 1146 - protein, 17 aa, Artificial Sequence
  Description of Artificial Sequence: Synthetic peptide
  N-term Ac
  MOD_RES (7)..(7): Alpha-Me R8-octenyl-alanine olefin amino acid connected by an all-carbon crosslinker comprising one double bond
  MISC_FEATURE (7)..(14): Crosslink between residues
  MOD_RES (14)..(14): Alpha-Me S5-pentenyl-alanine olefin amino acid connected by an all-carbon crosslinker comprising one double bond
  C-term NH2
IAAALRAIGDAFNAYYA

SEQ ID NO: 1147 - protein, 17 aa, Artificial Sequence
  Description of Artificial Sequence: Synthetic peptide
  N-term Ac
  MOD_RES (7)..(7): Alpha-Me R8-octenyl-alanine olefin amino acid connected by an all-carbon crosslinker comprising one double bond
  MISC_FEATURE (7)..(14): Crosslink between residues
  MOD_RES (14)..(14): Alpha-Me S5-pentenyl-alanine olefin amino acid connected by an all-carbon crosslinker comprising one double bond
  C-term NH2
IAQALAAIGDAFNAYYA

SEQ ID NO: 1148 - protein, 17 aa, Artificial Sequence
  Description of Artificial Sequence: Synthetic peptide
  N-term Ac
  MOD_RES (7)..(7): Alpha-Me R8-octenyl-alanine olefin amino acid connected by an all-carbon crosslinker comprising one double bond
  MISC_FEATURE (7)..(14): Crosslink between residues
  MOD_RES (14)..(14): Alpha-Me S5-pentenyl-alanine olefin amino acid connected by an all-carbon crosslinker comprising one double bond
  C-term NH2
IAQALRAIADAFNAYYA

SEQ ID NO: 1149 - protein, 17 aa, Artificial Sequence
  Description of Artificial Sequence: Synthetic peptide
  N-term Ac
  MOD_RES (7)..(7): Alpha-Me R8-octenyl-alanine olefin amino acid connected by an all-carbon crosslinker comprising one double bond
  MISC_FEATURE (7)..(14): Crosslink between residues
  MOD_RES (14)..(14): Alpha-Me S5-pentenyl-alanine olefin amino acid connected by an all-carbon crosslinker comprising one double bond
  C-term NH2
IAQALRAIGDAANAYYA

SEQ ID NO: 1150 - protein, 17 aa, Artificial Sequence
  Description of Artificial Sequence: Synthetic peptide
  N-term Ac
  MOD_RES (7)..(7): Alpha-Me R8-octenyl-alanine olefin amino acid connected by an all-carbon crosslinker comprising one double bond
  MISC_FEATURE (7)..(14): Crosslink between residues
  MOD_RES (14)..(14): Alpha-Me S5-pentenyl-alanine olefin amino acid connected by an all-carbon crosslinker comprising one double bond
  C-term NH2
IAQALRAIGDAFAAYYA

SEQ ID NO: 1151 - protein, 17 aa, Artificial Sequence
  Description of Artificial Sequence: Synthetic peptide
  N-term Ac
  MOD_RES (7)..(7): Alpha-Me R8-octenyl-alanine olefin amino acid connected by an all-carbon crosslinker comprising one double bond
  MISC_FEATURE (7)..(14): Crosslink between residues
  MOD_RES (14)..(14): Alpha-Me S5-pentenyl-alanine olefin amino acid connected by an all-carbon crosslinker comprising one double bond
  C-term NH2
IAQALRAIGDAFNAAYA

SEQ ID NO: 1152 - protein, 17 aa, Artificial Sequence
  Description of Artificial Sequence: Synthetic peptide
  N-term Ac
  MOD_RES (7)..(7): Alpha-Me R8-octenyl-alanine olefin amino acid connected by an all-carbon crosslinker comprising one double bond
  MISC_FEATURE (7)..(14): Crosslink between residues
  MOD_RES (14)..(14): Alpha-Me S5-pentenyl-alanine olefin amino acid connected by an all-carbon crosslinker comprising one double bond
  C-term NH2
IAQALRAIGDAFNAYAA

SEQ ID NO: 1153 - protein, 19 aa, Artificial Sequence
  Description of Artificial Sequence: Synthetic peptide
  N-term Ac
  C-term NH2
IAQALRRIGDEFNAYYAHH

SEQ ID NO: 1154 - protein, 19 aa, Artificial Sequence
  Description of Artificial Sequence: Synthetic peptide
  N-term Ac
  MOD_RES (7)..(7): Alpha-Me S5-pentenyl-alanine olefin amino acid connected by an all-carbon crosslinker comprising one double bond
  MISC_FEATURE (7)..(11): Crosslink between residues
  MOD_RES (11)..(11): Alpha-Me S5-pentenyl-alanine olefin amino acid connected by an all-carbon crosslinker comprising one double bond
  C-term NH2
IAQALRAIGDAFNAYYAHH

SEQ ID NO: 1155 - protein, 21 aa, Artificial Sequence
  Description of Artificial Sequence: Synthetic peptide
  N-term Ac
  C-term NH2
IWIAQALRRIGDEFNAYYAHH

SEQ ID NO: 1156 - protein, 21 aa, Artificial Sequence
  Description of Artificial Sequence: Synthetic peptide
  N-term Ac
  MOD_RES (9)..(9): Alpha-Me S5-pentenyl-alanine olefin amino acid connected by an all-carbon crosslinker comprising one double bond
  MISC_FEATURE (9)..(13): Crosslink between residues
  MOD_RES (13)..(13): Alpha-Me S5-pentenyl-alanine olefin amino acid connected by an all-carbon crosslinker comprising one double bond
  C-term NH2
IWIAQALRAIGDAFNAYYAHH

SEQ ID NO: 1157 - protein, 21 aa, Artificial Sequence
  Description of Artificial Sequence: Synthetic peptide
  N-term Ac
  MOD_RES (2)..(2): Alpha-Me S5-pentenyl-alanine olefin amino acid connected by an all-carbon crosslinker comprising one double bond
  MISC_FEATURE (2)..(6): Crosslink between residues
  MOD_RES (6)..(6): Alpha-Me S5-pentenyl-alanine olefin amino acid connected by an all-carbon crosslinker comprising one double bond
  MOD_RES (9)..(9): Alpha-Me S5-pentenyl-alanine olefin amino acid connected by an all-carbon crosslinker comprising one double bond
  MISC_FEATURE (9)..(13): Crosslink between residues
  MOD_RES (13)..(13): Alpha-Me S5-pentenyl-alanine olefin amino acid connected by an all-carbon crosslinker comprising one double bond
  C-term NH2
IAIAQALRAIGDAFNAYYAHH

SEQ ID NO: 1158 - protein, 19 aa, Artificial Sequence
  Description of Artificial Sequence: Synthetic peptide
  N-term heptenoic acid crosslinked with position 4 via an all-carbon crosslinker comprising one double bond
  MOD_RES (4)..(4): Alpha-Me S5-pentenyl-alanine olefin amino acid connected by an all-carbon crosslinker comprising one double bond
  C-term NH2
IAQALRRIGDEFNAYYAHH

SEQ ID NO: 1159 - protein, 19 aa, Artificial Sequence
  Description of Artificial Sequence: Synthetic peptide
  N-term heptenoic acid crosslinked with position 4 via an all-carbon crosslinker comprising one double bond
  MOD_RES (4)..(4): Alpha-Me S5-pentenyl-alanine olefin amino acid connected by an all-carbon crosslinker comprising one double bond
  MOD_RES (7)..(7): Alpha-Me S5-pentenyl-alanine olefin amino acid connected by an all-carbon crosslinker comprising one double bond
  MISC_FEATURE (7)..(11): Crosslink between residues
  MOD_RES (11)..(11): Alpha-Me S5-pentenyl-alanine olefin amino acid connected by an all-carbon crosslinker comprising one double bond
  C-term NH2
IAQALRAIGDAFNAYYAHH

SEQ ID NO: 1160 - protein, 19 aa, Artificial Sequence
  Description of Artificial Sequence: Synthetic peptide
  N-term heptenoic acid crosslinked with position 3 via an all-carbon crosslinker comprising one double bond
  MOD_RES (3)..(3): Alpha-Me S5-pentenyl-alanine olefin amino acid connected by an all-carbon crosslinker comprising one double bond
  C-term NH2
IAAALRRIGDEFNAYYAHH

SEQ ID NO: 1161 - protein, 19 aa, Artificial Sequence
  Description of Artificial Sequence: Synthetic peptide
  N-term heptenoic acid crosslinked with position 3 via an all-carbon crosslinker comprising one double bond
  MOD_RES (3)..(3): Alpha-Me S5-pentenyl-alanine olefin amino acid connected by an all-carbon crosslinker comprising one double bond
  MOD_RES (7)..(7): Alpha-Me S5-pentenyl-alanine olefin amino acid connected by an all-carbon crosslinker comprising one double bond
  MISC_FEATURE (7)..(11): Crosslink between residues
  MOD_RES (11)..(11): Alpha-Me S5-pentenyl-alanine olefin amino acid connected by an all-carbon crosslinker comprising one double bond
  C-term NH2
IAAALRAIGDAFNAYYAHH

SEQ ID NO: 1162 - protein, 21 aa, Artificial Sequence
  Description of Artificial Sequence: Synthetic peptide
  N-term Ac
  MOD_RES (2)..(2): Alpha-Me S5-pentenyl-alanine olefin amino acid connected by an all-carbon crosslinker comprising one double bond
  MISC_FEATURE (2)..(6): Crosslink between residues
  MOD_RES (6)..(6): Alpha-Me S5-pentenyl-alanine olefin amino acid connected by an all-carbon crosslinker comprising one double bond
  MOD_RES (15)..(15): Alpha-Me S5-pentenyl-alanine olefin amino acid connected by an all-carbon crosslinker comprising one double bond
  MISC_FEATURE (15)..(19): Crosslink between residues
  MOD_RES (19)..(19): Alpha-Me S5-pentenyl-alanine olefin amino acid connected by an all-carbon crosslinker comprising one double bond
  C-term NH2
IAIAQALRRIGDEFAAYYAAA

SEQ ID NO: 1163 - protein, 20 aa, Artificial Sequence
  Description of Artificial Sequence: Synthetic peptide
  N-term Ac
  MOD_RES (2)..(2): Alpha-Me S5-pentenyl-alanine olefin amino acid connected by an all-carbon crosslinker comprising one double bond
  MISC_FEATURE (2)..(6): Crosslink between residues
  MOD_RES (6)..(6): Alpha-Me S5-pentenyl-alanine olefin amino acid connected by an all-carbon crosslinker comprising one double bond
  MOD_RES (15)..(15): Alpha-Me S5-pentenyl-alanine olefin amino acid connected by an all-carbon crosslinker comprising one double bond
  MISC_FEATURE (15)..(19): Crosslink between residues
  MOD_RES (19)..(19): Alpha-Me S5-pentenyl-alanine olefin amino acid connected by an all-carbon crosslinker comprising one double bond
  C-term NH2
IAIAQALRRIGDEFAAYYAA

SEQ ID NO: 1164 - protein, 20 aa, Artificial Sequence
  Description of Artificial Sequence: Synthetic peptide
  N-term Ac
  MOD_RES (2)..(2): Alpha-Me S5-pentenyl-alanine olefin amino acid connected by an all-carbon crosslinker comprising one double bond
  MISC_FEATURE (2)..(6): Crosslink between residues
  MOD_RES (6)..(6): Alpha-Me S5-pentenyl-alanine olefin amino acid connected by an all-carbon crosslinker comprising one double bond
  MOD_RES (15)..(15): Alpha-Me S5-pentenyl-alanine olefin amino acid connected by an all-carbon crosslinker comprising one double bond
  MISC_FEATURE (15)..(19): Crosslink between residues
  MOD_RES (19)..(19): Alpha-Me S5-pentenyl-alanine olefin amino acid connected by an all-carbon crosslinker comprising one double bond
  C-term NH2
IAIAAALRRIGDEFAAYYAA

SEQ ID NO: 1165 - protein, 20 aa, Artificial Sequence
  Description of Artificial Sequence: Synthetic peptide
  N-term Ac
  MOD_RES (2)..(2): Alpha-Me S5-pentenyl-alanine olefin amino acid connected by an all-carbon crosslinker comprising one double bond
  MISC_FEATURE (2)..(6): Crosslink between residues
  MOD_RES (6)..(6): Alpha-Me S5-pentenyl-alanine olefin amino acid connected by an all-carbon crosslinker comprising one double bond
  MOD_RES (15)..(15): Alpha-Me S5-pentenyl-alanine olefin amino acid connected by an all-carbon crosslinker comprising one double bond
  MISC_FEATURE (15)..(19): Crosslink between residues
  MOD_RES (19)..(19): Alpha-Me S5-pentenyl-alanine olefin amino acid connected by an all-carbon crosslinker comprising one double bond
  C-term NH2
IAIAVALRRIGDEFAAYYAA

SEQ ID NO: 1166 - protein, 20 aa, Artificial Sequence
  Description of Artificial Sequence: Synthetic peptide
  N-term Ac
  MOD_RES (2)..(2): Alpha-Me S5-pentenyl-alanine olefin amino acid connected by an all-carbon crosslinker comprising one double bond
  MISC_FEATURE (2)..(6): Crosslink between residues
  MOD_RES (6)..(6): Alpha-Me S5-pentenyl-alanine olefin amino acid connected by an all-carbon crosslinker comprising one double bond
  MOD_RES (15)..(15): Alpha-Me S5-pentenyl-alanine olefin amino acid connected by an all-carbon crosslinker comprising one double bond
  MISC_FEATURE (15)..(19): Crosslink between residues
  MOD_RES (19)..(19): Alpha-Me S5-pentenyl-alanine olefin amino acid connected by an all-carbon crosslinker comprising one double bond
  C-term NH2
IAIALALRRIGDEFAAYYAA

SEQ ID NO: 1167 - protein, 20 aa, Artificial Sequence
  Description of Artificial Sequence: Synthetic peptide
  N-term Ac
  MOD_RES (2)..(2): Alpha-Me S5-pentenyl-alanine olefin amino acid connected by an all-carbon crosslinker comprising one double bond
  MISC_FEATURE (2)..(6): Crosslink between residues
  MOD_RES (6)..(6): Alpha-Me S5-pentenyl-alanine olefin amino acid connected by an all-carbon crosslinker comprising one double bond
  MOD_RES (15)..(15): Alpha-Me S5-pentenyl-alanine olefin amino acid connected by an all-carbon crosslinker comprising one double bond
  MISC_FEATURE (15)..(19): Crosslink between residues
  MOD_RES (19)..(19): Alpha-Me S5-pentenyl-alanine olefin amino acid connected by an all-carbon crosslinker comprising one double bond
  C-term NH2
IAIAIALRRIGDEFAAYYAA

SEQ ID NO: 1168 - protein, 20 aa, Artificial Sequence
  Description of Artificial Sequence: Synthetic peptide
  N-term Ac
  MOD_RES (2)..(2): Alpha-Me S5-pentenyl-alanine olefin amino acid connected by an all-carbon crosslinker comprising one double bond
  MISC_FEATURE (2)..(6): Crosslink between residues
  MOD_RES (6)..(6): Alpha-Me S5-pentenyl-alanine olefin amino acid connected by an all-carbon crosslinker comprising one double bond
  MOD_RES (15)..(15): Alpha-Me S5-pentenyl-alanine olefin amino acid connected by an all-carbon crosslinker comprising one double bond
  MISC_FEATURE (15)..(19): Crosslink between residues
  MOD_RES (19)..(19): Alpha-Me S5-pentenyl-alanine olefin amino acid connected by an all-carbon crosslinker comprising one double bond
  C-term NH2
IAIAFALRRIGDEFAAYYAA

SEQ ID NO: 1169 - protein, 20 aa, Artificial Sequence
  Description of Artificial Sequence: Synthetic peptide
  N-term Ac
  MOD_RES (2)..(2): Alpha-Me S5-pentenyl-alanine olefin amino acid connected by an all-carbon crosslinker comprising one double bond
  MISC_FEATURE (2)..(6): Crosslink between residues
  MOD_RES (6)..(6): Alpha-Me S5-pentenyl-alanine olefin amino acid connected by an all-carbon crosslinker comprising one double bond
  MOD_RES (15)..(15): Alpha-Me S5-pentenyl-alanine olefin amino acid connected by an all-carbon crosslinker comprising one double bond
  MISC_FEATURE (15)..(19): Crosslink between residues
  MOD_RES (19)..(19): Alpha-Me S5-pentenyl-alanine olefin amino acid connected by an all-carbon crosslinker comprising one double bond
  C-term NH2
IAIAYALRRIGDEFAAYYAA

SEQ ID NO: 1170 - protein, 20 aa, Artificial Sequence
  Description of Artificial Sequence: Synthetic peptide
  N-term Ac
  MOD_RES (2)..(2): Alpha-Me S5-pentenyl-alanine olefin amino acid connected by an all-carbon crosslinker comprising one double bond
  MISC_FEATURE (2)..(6): Crosslink between residues
  MOD_RES (6)..(6): Alpha-Me S5-pentenyl-alanine olefin amino acid connected by an all-carbon crosslinker comprising one double bond
  MOD_RES (15)..(15): Alpha-Me S5-pentenyl-alanine olefin amino acid connected by an all-carbon crosslinker comprising one double bond
  MISC_FEATURE (15)..(19): Crosslink between residues
  MOD_RES (19)..(19): Alpha-Me S5-pentenyl-alanine olefin amino acid connected by an all-carbon crosslinker comprising one double bond
  C-term NH2
IAIAGALRRIGDEFAAYYAA

SEQ ID NO: 1171 - protein, 20 aa, Artificial Sequence
  Description of Artificial Sequence: Synthetic peptide
  N-term Ac
  MOD_RES (2)..(2): Alpha-Me S5-pentenyl-alanine olefin amino acid connected by an all-carbon crosslinker comprising one double bond
  MISC_FEATURE (2)..(6): Crosslink between residues
  MOD_RES (6)..(6): Alpha-Me S5-pentenyl-alanine olefin amino acid connected by an all-carbon crosslinker comprising one double bond
  MOD_RES (15)..(15): Alpha-Me S5-pentenyl-alanine olefin amino acid connected by an all-carbon crosslinker comprising one double bond
  MISC_FEATURE (15)..(19): Crosslink between residues
  MOD_RES (19)..(19): Alpha-Me S5-pentenyl-alanine olefin amino acid connected by an all-carbon crosslinker comprising one double bond
  C-term NH2
IAIAQALRAIGDAFAAYYAA

SEQ ID NO: 1172 - protein, 20 aa, Artificial Sequence
  Description of Artificial Sequence: Synthetic peptide
  N-term Ac
  MOD_RES (2)..(2): Alpha-Me S5-pentenyl-alanine olefin amino acid connected by an all-carbon crosslinker comprising one double bond
  MISC_FEATURE (2)..(6): Crosslink between residues
  MOD_RES (6)..(6): Alpha-Me S5-pentenyl-alanine olefin amino acid connected by an all-carbon crosslinker comprising one double bond
  MOD_RES (13)..(13): 2-aminoisobutyric acid
  MOD_RES (15)..(15): Alpha-Me S5-pentenyl-alanine olefin amino acid connected by an all-carbon crosslinker comprising one double bond
  MISC_FEATURE (15)..(19): Crosslink between residues
  MOD_RES (19)..(19): Alpha-Me S5-pentenyl-alanine olefin amino acid connected by an all-carbon crosslinker comprising one double bond
  C-term NH2
IAIAQALRAIGDXFAAYYAA

SEQ ID NO: 1173 - protein, 20 aa, Artificial Sequence
  Description of Artificial Sequence: Synthetic peptide
  N-term Ac
  MOD_RES (2)..(2): Alpha-Me S5-pentenyl-alanine olefin amino acid connected by an all-carbon crosslinker comprising one double bond
  MISC_FEATURE (2)..(6): Crosslink between residues
  MOD_RES (6)..(6): Alpha-Me S5-pentenyl-alanine olefin amino acid connected by an all-carbon crosslinker comprising one double bond
  MOD_RES (9)..(9): 2-aminoisobutyric acid
  MOD_RES (15)..(15): Alpha-Me S5-pentenyl-alanine olefin amino acid connected by an all-carbon crosslinker comprising one double bond
  MISC_FEATURE (15)..(19): Crosslink between residues
  MOD_RES (19)..(19): Alpha-Me S5-pentenyl-alanine olefin amino acid connected by an all-carbon crosslinker comprising one double bond
  C-term NH2
IAIAQALRXIGDAFAAYYAA

SEQ ID NO: 1174 - protein, 20 aa, Artificial Sequence
  Description of Artificial Sequence: Synthetic peptide
  N-term Ac
  MOD_RES (2)..(2): Alpha-Me S5-pentenyl-alanine olefin amino acid connected by an all-carbon crosslinker comprising one double bond
  MISC_FEATURE (2)..(6): Crosslink between residues
  MOD_RES (6)..(6): Alpha-Me S5-pentenyl-alanine olefin amino acid connected by an all-carbon crosslinker comprising one double bond
  MOD_RES (9)..(9): 2-aminoisobutyric acid
  MOD_RES (13)..(13): 2-aminoisobutyric acid
  MOD_RES (15)..(15): Alpha-Me S5-pentenyl-alanine olefin amino acid connected by an all-carbon crosslinker comprising one double bond
  MISC_FEATURE (15)..(19): Crosslink between residues
  MOD_RES (19)..(19): Alpha-Me S5-pentenyl-alanine olefin amino acid connected by an all-carbon crosslinker comprising one double bond
  C-term NH2
IAIAQALRXIGDXFAAYYAA

SEQ ID NO: 1175 - protein, 20 aa, Artificial Sequence
  Description of Artificial Sequence: Synthetic peptide
  N-term Ac
  MOD_RES (2)..(2): Alpha-Me S5-pentenyl-alanine olefin amino acid connected by an all-carbon crosslinker comprising one double bond
  MISC_FEATURE (2)..(6): Crosslink between residues
  MOD_RES (6)..(6): Alpha-Me S5-pentenyl-alanine olefin amino acid connected by an all-carbon crosslinker comprising one double bond
  MOD_RES (9)..(9): Norleucine
  MOD_RES (13)..(13): Norleucine
  MOD_RES (15)..(15): Alpha-Me S5-pentenyl-alanine olefin amino acid connected by an all-carbon crosslinker comprising one double bond
  MISC_FEATURE (15)..(19): Crosslink between residues
  MOD_RES (19)..(19): Alpha-Me S5-pentenyl-alanine olefin amino acid connected by an all-carbon crosslinker comprising one double bond
  C-term NH2
IAIAQALRLIGDLFAAYYAA

SEQ ID NO: 1176 - protein, 20 aa, Artificial Sequence
  Description of Artificial Sequence: Synthetic peptide
  N-term Ac
  MOD_RES (2)..(2): Alpha-Me S5-pentenyl-alanine olefin amino acid connected by an all-carbon crosslinker comprising one double bond
  MISC_FEATURE (2)..(6): Crosslink between residues
  MOD_RES (6)..(6): Alpha-Me S5-pentenyl-alanine olefin amino acid connected by an all-carbon crosslinker comprising one double bond
  MOD_RES (9)..(9): Norleucine
  MOD_RES (13)..(13): 2-aminoisobutyric acid
  MOD_RES (15)..(15): Alpha-Me S5-pentenyl-alanine olefin amino acid connected by an all-carbon crosslinker comprising one double bond
  MISC_FEATURE (15)..(19): Crosslink between residues
  MOD_RES (19)..(19): Alpha-Me S5-pentenyl-alanine olefin amino acid connected by an all-carbon crosslinker comprising one double bond
  C-term NH2
IAIAQALRLIGDXFAAYYAA

SEQ ID NO: 1177 - protein, 20 aa, Artificial Sequence
  Description of Artificial Sequence: Synthetic peptide
  N-term Ac
  MOD_RES (2)..(2): Alpha-Me S5-pentenyl-alanine olefin amino acid connected by an all-carbon crosslinker comprising one double bond
  MISC_FEATURE (2)..(6): Crosslink between residues
  MOD_RES (6)..(6): Alpha-Me S5-pentenyl-alanine olefin amino acid connected by an all-carbon crosslinker comprising one double bond
  MOD_RES (9)..(9): 2-aminoisobutyric acid
  MOD_RES (13)..(13): Norleucine
  MOD_RES (15)..(15): Alpha-Me S5-pentenyl-alanine olefin amino acid connected by an all-carbon crosslinker comprising one double bond
  MISC_FEATURE (15)..(19): Crosslink between residues
  MOD_RES (19)..(19): Alpha-Me S5-pentenyl-alanine olefin amino acid connected by an all-carbon crosslinker comprising one double bond
  C-term NH2
IAIAQALRXIGDLFAAYYAA

SEQ ID NO: 1178 - protein, 19 aa, Artificial Sequence
  Description of Artificial Sequence: Synthetic peptide
  N-term Ac
  MOD_RES (2)..(2): Alpha-Me S5-pentenyl-alanine olefin amino acid connected by an all-carbon crosslinker comprising one double bond
  MISC_FEATURE (2)..(6): Crosslink between residues
  MOD_RES (6)..(6): Alpha-Me S5-pentenyl-alanine olefin amino acid connected by an all-carbon crosslinker comprising one double bond
  MOD_RES (9)..(9): Alpha-Me R8-octenyl-alanine olefin amino acid connected by an all-carbon crosslinker comprising one double bond
  MISC_FEATURE (9)..(16): Crosslink between residues
  MOD_RES (16)..(16): Alpha-Me S5-pentenyl-alanine olefin amino acid connected by an all-carbon crosslinker comprising one double bond
  C-term NH2
IAIAQALRAIGDEFNAYYA

SEQ ID NO: 1179 - protein, 19 aa, Artificial Sequence
  Description of Artificial Sequence: Synthetic peptide
  N-term Ac
  MOD_RES (2)..(2): Alpha-Me S5-pentenyl-alanine olefin amino acid connected by an all-carbon crosslinker comprising one double bond
  MISC_FEATURE (2)..(6): Crosslink between residues
  MOD_RES (6)..(6): Alpha-Me S5-pentenyl-alanine olefin amino acid connected by an all-carbon crosslinker comprising one double bond
  MOD_RES (9)..(9): Alpha-Me R8-octenyl-alanine olefin amino acid connected by an all-carbon crosslinker comprising one double bond
  MISC_FEATURE (9)..(16): Crosslink between residues
  MOD_RES (16)..(16): Alpha-Me S5-pentenyl-alanine olefin amino acid connected by an all-carbon crosslinker comprising one double bond
  C-term NH2
IAIAAALRAIGDEFNAYYA

SEQ ID NO: 1180 - protein, 19 aa, Artificial Sequence
  Description of Artificial Sequence: Synthetic peptide
  N-term Ac
  MOD_RES (2)..(2): Alpha-Me S5-pentenyl-alanine olefin amino acid connected by an all-carbon crosslinker comprising one double bond
  MISC_FEATURE (2)..(6): Crosslink between residues
  MOD_RES (6)..(6): Alpha-Me S5-pentenyl-alanine olefin amino acid connected by an all-carbon crosslinker comprising one double bond
  MOD_RES (9)..(9): Alpha-Me R8-octenyl-alanine olefin amino acid connected by an all-carbon crosslinker comprising one double bond
  MISC_FEATURE (9)..(16): Crosslink between residues
  MOD_RES (16)..(16): Alpha-Me S5-pentenyl-alanine olefin amino acid connected by an all-carbon crosslinker comprising one double bond
  C-term NH2
IAIAVALRAIGDEFNAYYA

SEQ ID NO: 1181 - protein, 19 aa, Artificial Sequence
  Description of Artificial Sequence: Synthetic peptide
  N-term Ac
  MOD_RES (2)..(2): Alpha-Me S5-pentenyl-alanine olefin amino acid connected by an all-carbon crosslinker comprising one double bond
  MISC_FEATURE (2)..(6): Crosslink between residues
  MOD_RES (6)..(6): Alpha-Me S5-pentenyl-alanine olefin amino acid connected by an all-carbon crosslinker comprising one double bond
  MOD_RES (9)..(9): Alpha-Me R8-octenyl-alanine olefin amino acid connected by an all-carbon crosslinker comprising one double bond
  MISC_FEATURE (9)..(16): Crosslink between residues
  MOD_RES (16)..(16): Alpha-Me S5-pentenyl-alanine olefin amino acid connected by an all-carbon crosslinker comprising one double bond
  C-term NH2
IAIALALRAIGDEFNAYYA

SEQ ID NO: 1182 - protein, 19 aa, Artificial Sequence
  Description of Artificial Sequence: Synthetic peptide
  N-term Ac
  MOD_RES (2)..(2): Alpha-Me S5-pentenyl-alanine olefin amino acid connected by an all-carbon crosslinker comprising one double bond
  MISC_FEATURE (2)..(6): Crosslink between residues
  MOD_RES (6)..(6): Alpha-Me S5-pentenyl-alanine olefin amino acid connected by an all-carbon crosslinker comprising one double bond
  MOD_RES (9)..(9): Alpha-Me R8-octenyl-alanine olefin amino acid connected by an all-carbon crosslinker comprising one double bond
  MISC_FEATURE (9)..(16): Crosslink between residues
  MOD_RES (16)..(16): Alpha-Me S5-pentenyl-alanine olefin amino acid connected by an all-carbon crosslinker comprising one double bond
  C-term NH2
IAIAIALRAIGDEFNAYYA

SEQ ID NO: 1183 - protein, 19 aa, Artificial Sequence
  Description of Artificial Sequence: Synthetic peptide
  N-term Ac
  MOD_RES (2)..(2): Alpha-Me S5-pentenyl-alanine olefin amino acid connected by an all-carbon crosslinker comprising one double bond
  MISC_FEATURE (2)..(6): Crosslink between residues
  MOD_RES (6)..(6): Alpha-Me S5-pentenyl-alanine olefin amino acid connected by an all-carbon crosslinker comprising one double bond
  MOD_RES (9)..(9): Alpha-Me R8-octenyl-alanine olefin amino acid connected by an all-carbon crosslinker comprising one double bond
  MISC_FEATURE (9)..(16): Crosslink between residues
  MOD_RES (16)..(16): Alpha-Me S5-pentenyl-alanine olefin amino acid connected by an all-carbon crosslinker comprising one double bond
  C-term NH2
IAIAFALRAIGDEFNAYYA

SEQ ID NO: 1184 - protein, 19 aa, Artificial Sequence
  Description of Artificial Sequence: Synthetic peptide
  N-term Ac
  MOD_RES (2)..(2): Alpha-Me S5-pentenyl-alanine olefin amino acid connected by an all-carbon crosslinker comprising one double bond
  MISC_FEATURE (2)..(6): Crosslink between residues
  MOD_RES (6)..(6): Alpha-Me S5-pentenyl-alanine olefin amino acid connected by an all-carbon crosslinker comprising one double bond
  MOD_RES (9)..(9): Alpha-Me R8-octenyl-alanine olefin amino acid connected by an all-carbon crosslinker comprising one double bond
  MISC_FEATURE (9)..(16): Crosslink between residues
  MOD_RES (16)..(16): Alpha-Me S5-pentenyl-alanine olefin amino acid connected by an all-carbon crosslinker comprising one double bond
  C-term NH2
IAIAYALRAIGDEFNAYYA

SEQ ID NO: 1185 - protein, 19 aa, Artificial Sequence
  Description of Artificial Sequence: Synthetic peptide
  N-term Ac
  MOD_RES (2)..(2): Alpha-Me S5-pentenyl-alanine olefin amino acid connected by an all-carbon crosslinker comprising one double bond
  MISC_FEATURE (2)..(6): Crosslink between residues
  MOD_RES (6)..(6): Alpha-Me S5-pentenyl-alanine olefin amino acid connected by an all-carbon crosslinker comprising one double bond
  MOD_RES (9)..(9): Alpha-Me R8-octenyl-alanine olefin amino acid connected by an all-carbon crosslinker comprising one double bond
  MISC_FEATURE (9)..(16): Crosslink between residues
  MOD_RES (16)..(16): Alpha-Me S5-pentenyl-alanine olefin amino acid connected by an all-carbon crosslinker comprising one double bond
  C-term NH2
IAIAGALRAIGDEFNAYYA

SEQ ID NO: 1186 - protein, 19 aa, Artificial Sequence
  Description of Artificial Sequence: Synthetic peptide
  N-term Ac
  MOD_RES (2)..(2): Alpha-Me S5-pentenyl-alanine olefin amino acid connected by an all-carbon crosslinker comprising one double bond
  MISC_FEATURE (2)..(6): Crosslink between residues
  MOD_RES (6)..(6): Alpha-Me S5-pentenyl-alanine olefin amino acid connected by an all-carbon crosslinker comprising one double bond
  MOD_RES (9)..(9): Alpha-Me R8-octenyl-alanine olefin amino acid connected by an all-carbon crosslinker comprising one double bond
  MISC_FEATURE (9)..(16): Crosslink between residues
  MOD_RES (16)..(16): Alpha-Me S5-pentenyl-alanine olefin amino acid connected by an all-carbon crosslinker comprising one double bond
  C-term NH2
IAIAQALRAIGDAFNAYYA

SEQ ID NO: 1187 - protein, 19 aa, Artificial Sequence
  Description of Artificial Sequence: Synthetic peptide
  N-term Ac
  MOD_RES (2)..(2): Alpha-Me S5-pentenyl-alanine olefin amino acid connected by an all-carbon crosslinker comprising one double bond
  MISC_FEATURE (2)..(6): Crosslink between residues
  MOD_RES (6)..(6): Alpha-Me S5-pentenyl-alanine olefin amino acid connected by an all-carbon crosslinker comprising one double bond
  MOD_RES (9)..(9): Alpha-Me R8-octenyl-alanine olefin amino acid connected by an all-carbon crosslinker comprising one double bond
  MISC_FEATURE (9)..(16): Crosslink between residues
  MOD_RES (13)..(13): Norleucine
  MOD_RES (16)..(16): Alpha-Me S5-pentenyl-alanine olefin amino acid connected by an all-carbon crosslinker comprising one double bond
  C-term NH2
IAIAQALRAIGDLFNAYYA

SEQ ID NO: 1188 - protein, 19 aa, Artificial Sequence
  Description of Artificial Sequence: Synthetic peptide
  N-term Ac
  MOD_RES (2)..(2): Alpha-Me S5-pentenyl-alanine olefin amino acid connected by an all-carbon crosslinker comprising one double bond
  MISC_FEATURE (2)..(6): Crosslink between residues
  MOD_RES (6)..(6): Alpha-Me S5-pentenyl-alanine olefin amino acid connected by an all-carbon crosslinker comprising one double bond
  MOD_RES (9)..(9): Alpha-Me R8-octenyl-alanine olefin amino acid connected by an all-carbon crosslinker comprising one double bond
  MISC_FEATURE (9)..(16): Crosslink between residues
  MOD_RES (13)..(13): 2-aminoisobutyric acid
  MOD_RES (16)..(16): Alpha-Me S5-pentenyl-alanine olefin amino acid connected by an all-carbon crosslinker comprising one double bond
  C-term NH2
IAIAQALRAIGDXFNAYYA

SEQ ID NO: 1189 - protein, 21 aa, Artificial Sequence
  Description of Artificial Sequence: Synthetic peptide
  N-term Ac
  MOD_RES (5)..(5): Alpha-Me S5-pentenyl-alanine olefin amino acid connected by an all-carbon crosslinker comprising one double bond
  MISC_FEATURE (5)..(9): Crosslink between residues
  MOD_RES (9)..(9): Alpha-Me S5-pentenyl-alanine olefin amino acid connected by an all-carbon crosslinker comprising one double bond
  MOD_RES (13)..(13): Alpha-Me R8-octenyl-alanine olefin amino acid connected by an all-carbon crosslinker comprising one double bond
  MISC_FEATURE (13)..(20): Crosslink between residues
  MOD_RES (20)..(20): Alpha-Me S5-pentenyl-alanine olefin amino acid connected by an all-carbon crosslinker comprising one double bond
  C-term NH2
IWIAAELRAIGDAFNAYYAAA

SEQ ID NO: 1190 - protein, 21 aa, Artificial Sequence
  Description of Artificial Sequence: Synthetic peptide
  N-term Ac
  MOD_RES (5)..(5): Alpha-Me S5-pentenyl-alanine olefin amino acid connected by an all-carbon crosslinker comprising one double bond
  MISC_FEATURE (5)..(9): Crosslink between residues
  MOD_RES (9)..(9): Alpha-Me S5-pentenyl-alanine olefin amino acid connected by an all-carbon crosslinker comprising one double bond
  MOD_RES (13)..(13): Alpha-Me R8-octenyl-alanine olefin amino acid connected by an all-carbon crosslinker comprising one double bond
  MISC_FEATURE (13)..(20): Crosslink between residues
  MOD_RES (20)..(20): Alpha-Me S5-pentenyl-alanine olefin amino acid connected by an all-carbon crosslinker comprising one double bond
  C-term NH2
IWIAAALRAIGDAFNAYYAAA

SEQ ID NO: 1191 - protein, 21 aa, Artificial Sequence
  Description of Artificial Sequence: Synthetic peptide
  N-term Ac
  MOD_RES (5)..(5): Alpha-Me S5-pentenyl-alanine olefin amino acid connected by an all-carbon crosslinker comprising one double bond
  MISC_FEATURE (5)..(9): Crosslink between residues
  MOD_RES (9)..(9): Alpha-Me S5-pentenyl-alanine olefin amino acid connected by an all-carbon crosslinker comprising one double bond
  MOD_RES (13)..(13): Alpha-Me R8-octenyl-alanine olefin amino acid connected by an all-carbon crosslinker comprising one double bond
  MISC_FEATURE (13)..(20): Crosslink between residues
  MOD_RES (20)..(20): Alpha-Me S5-pentenyl-alanine olefin amino acid connected by an all-carbon crosslinker comprising one double bond
  C-term NH2
IWIAAVLRAIGDAFNAYYAAA

SEQ ID NO: 1192 - protein, 21 aa, Artificial Sequence
  Description of Artificial Sequence: Synthetic peptide
  N-term Ac
  MOD_RES (5)..(5): Alpha-Me S5-pentenyl-alanine olefin amino acid connected by an all-carbon crosslinker comprising one double bond
  MISC_FEATURE (5)..(9): Crosslink between residues
  MOD_RES (9)..(9): Alpha-Me S5-pentenyl-alanine olefin amino acid connected by an all-carbon crosslinker comprising one double bond
  MOD_RES (13)..(13): Alpha-Me R8-octenyl-alanine olefin amino acid connected by an all-carbon crosslinker comprising one double bond
  MISC_FEATURE (13)..(20): Crosslink between residues
  MOD_RES (20)..(20): Alpha-Me S5-pentenyl-alanine olefin amino acid connected by an all-carbon crosslinker comprising one double bond
  C-term NH2
IWIAALLRAIGDAFNAYYAAA

SEQ ID NO: 1193 - protein, 21 aa, Artificial Sequence
  Description of Artificial Sequence: Synthetic peptide
  N-term Ac
  MOD_RES (5)..(5): Alpha-Me S5-pentenyl-alanine olefin amino acid connected by an all-carbon crosslinker comprising one double bond
  MISC_FEATURE (5)..(9): Crosslink between residues
  MOD_RES (9)..(9): Alpha-Me S5-pentenyl-alanine olefin amino acid connected by an all-carbon crosslinker comprising one double bond
  MOD_RES (13)..(13): Alpha-Me R8-octenyl-alanine olefin amino acid connected by an all-carbon crosslinker comprising one double bond
  MISC_FEATURE (13)..(20): Crosslink between residues
  MOD_RES (20)..(20): Alpha-Me S5-pentenyl-alanine olefin amino acid connected by an all-carbon crosslinker comprising one double bond
  C-term NH2
IWIAAILRAIGDAFNAYYAAA

SEQ ID NO: 1194 - protein, 21 aa, Artificial Sequence
  Description of Artificial Sequence: Synthetic peptide
  N-term Ac
  MOD_RES (5)..(5): Alpha-Me S5-pentenyl-alanine olefin amino acid connected by an all-carbon crosslinker comprising one double bond
  MISC_FEATURE (5)..(9): Crosslink between residues
  MOD_RES (9)..(9): Alpha-Me S5-pentenyl-alanine olefin amino acid connected by an all-carbon crosslinker comprising one double bond
  MOD_RES (13)..(13): Alpha-Me R8-octenyl-alanine olefin amino acid connected by an all-carbon crosslinker comprising one double bond
  MISC_FEATURE (13)..(20): Crosslink between residues
  MOD_RES (20)..(20): Alpha-Me S5-pentenyl-alanine olefin amino acid connected by an all-carbon crosslinker comprising one double bond
  C-term NH2
IWIAAFLRAIGDAFNAYYAAA

SEQ ID NO: 1195 - protein, 21 aa, Artificial Sequence
  Description of Artificial Sequence: Synthetic peptide
  N-term Ac
  MOD_RES (5)..(5): Alpha-Me S5-pentenyl-alanine olefin amino acid connected by an all-carbon crosslinker comprising one double bond
  MISC_FEATURE (5)..(9): Crosslink between residues
  MOD_RES (9)..(9): Alpha-Me S5-pentenyl-alanine olefin amino acid connected by an all-carbon crosslinker comprising one double bond
  MOD_RES (13)..(13): Alpha-Me R8-octenyl-alanine olefin amino acid connected by an all-carbon crosslinker comprising one double bond
  MISC_FEATURE (13)..(20): Crosslink between residues
  MOD_RES (20)..(20): Alpha-Me S5-pentenyl-alanine olefin amino acid connected by an all-carbon crosslinker comprising one double bond
  C-term NH2
IWIAAYLRAIGDAFNAYYAAA

SEQ ID NO: 1196 - protein, 21 aa, Artificial Sequence
  Description of Artificial Sequence: Synthetic peptide
  N-term Ac
  MOD_RES (5)..(5): Alpha-Me S5-pentenyl-alanine olefin amino acid connected by an all-carbon crosslinker comprising one double bond
  MISC_FEATURE (5)..(9): Crosslink between residues
  MOD_RES (9)..(9): Alpha-Me S5-pentenyl-alanine olefin amino acid connected by an all-carbon crosslinker comprising one double bond
  MOD_RES (13)..(13): Alpha-Me R8-octenyl-alanine olefin amino acid connected by an all-carbon crosslinker comprising one double bond
  MISC_FEATURE (13)..(20): Crosslink between residues
  MOD_RES (20)..(20): Alpha-Me S5-pentenyl-alanine olefin amino acid connected by an all-carbon crosslinker comprising one double bond
  C-term NH2
IWIAAGLRAIGDAFNAYYAAA

SEQ ID NO: 1197 - protein, 21 aa, Artificial Sequence
  Description of Artificial Sequence: Synthetic peptide
  N-term Ac
  MOD_RES (5)..(5): Alpha-Me S5-pentenyl-alanine olefin amino acid connected by an all-carbon crosslinker comprising one double bond
  MISC_FEATURE (5)..(9): Crosslink between residues
  MOD_RES (9)..(9): Alpha-Me S5-pentenyl-alanine olefin amino acid connected by an all-carbon crosslinker comprising one double bond
  MOD_RES (13)..(13): Alpha-Me R8-octenyl-alanine olefin amino acid connected by an all-carbon crosslinker comprising one double bond
  MISC_FEATURE (13)..(20): Crosslink between residues
  MOD_RES (20)..(20): Alpha-Me S5-pentenyl-alanine olefin amino acid connected by an all-carbon crosslinker comprising one double bond
  C-term NH2
IWIAASLRAIGDAFNAYYAAA

SEQ ID NO: 1198 - protein, 19 aa, Artificial Sequence
  Description of Artificial Sequence: Synthetic peptide
  N-term Ac
  MOD_RES (2)..(2): Alpha-Me S5-pentenyl-alanine olefin amino acid connected by an all-carbon crosslinker comprising one double bond
  MISC_FEATURE (2)..(6): Crosslink between residues
  MOD_RES (6)..(6): Alpha-Me S5-pentenyl-alanine olefin amino acid connected by an all-carbon crosslinker comprising one double bond
  MOD_RES (15)..(15): Alpha-Me S5-pentenyl-alanine olefin amino acid connected by an all-carbon crosslinker comprising one double bond
  MISC_FEATURE (15)..(19): Crosslink between residues
  MOD_RES (19)..(19): Alpha-Me S5-pentenyl-alanine olefin amino acid connected by an all-carbon crosslinker comprising one double bond
  C-term NH2
IAIAQALRRIGDEFAAYYA

SEQ ID NO: 1199 - protein, 20 aa, Artificial Sequence
  Description of Artificial Sequence: Synthetic peptide
  N-term Ac
  MOD_RES (5)..(5): Alpha-Me S5-pentenyl-alanine olefin amino acid connected by an all-carbon crosslinker comprising one double bond
  MISC_FEATURE (5)..(9): Crosslink between residues
  MOD_RES (9)..(9): Alpha-Me S5-pentenyl-alanine olefin amino acid connected by an all-carbon crosslinker comprising one double bond
  MOD_RES (13)..(13): Alpha-Me R8-octenyl-alanine olefin amino acid connected by an all-carbon crosslinker comprising one double bond
  MISC_FEATURE (13)..(20): Crosslink between residues
  MOD_RES (20)..(20): Alpha-Me S5-pentenyl-alanine olefin amino acid connected by an all-carbon crosslinker comprising one double bond
  C-term NH2
IWIAAELRAIGDAFNAYYAA

SEQ ID NO: 1200 - protein, 18 aa, Artificial Sequence
  Description of Artificial Sequence: Synthetic peptide
  N-term Ac
  MOD_RES (8)..(8): Alpha-Me R8-octenyl-alanine olefin amino acid connected by an all-carbon crosslinker comprising one double bond
  MISC_FEATURE (8)..(15): Crosslink between residues
  MOD_RES (15)..(15): Alpha-Me S5-pentenyl-alanine olefin amino acid connected by an all-carbon crosslinker comprising one double bond
  C-term NH2
WIAQALRAIGDAFNAYYA

SEQ ID NO: 1201 - protein, 17 aa, Artificial Sequence
  Description of Artificial Sequence: Synthetic peptide
  N-term Ac
  MOD_RES (7)..(7): Alpha-Me R8-octenyl-alanine olefin amino acid connected by an all-carbon crosslinker comprising one double bond
  MISC_FEATURE (7)..(14): Crosslink between residues
  MOD_RES (14)..(14): Alpha-Me S5-pentenyl-alanine olefin amino acid connected by an all-carbon crosslinker comprising one double bond
  C-term NH2
IAQALRAIGDAFNAYYA

SEQ ID NO: 1202 - protein, 17 aa, Artificial Sequence
  Description of Artificial Sequence: Synthetic peptide
  N-term Ac
  MOD_RES (7)..(7): Alpha-Me R8-octenyl-alanine olefin amino acid connected by an all-carbon crosslinker comprising one double bond
  MISC_FEATURE (7)..(14): Crosslink between residues
  MOD_RES (14)..(14): Alpha-Me S5-pentenyl-alanine olefin amino acid connected by an all-carbon crosslinker comprising one double bond
  C-term NH2
IAAALRAIGDAFNAYYA

SEQ ID NO: 1203 - protein, 17 aa, Artificial Sequence
  Description of Artificial Sequence: Synthetic peptide
  N-term Ac
  MOD_RES (7)..(7): Alpha-Me R8-octenyl-alanine olefin amino acid connected by an all-carbon crosslinker comprising one double bond
  MISC_FEATURE (7)..(14): Crosslink between residues
  MOD_RES (14)..(14): Alpha-Me S5-pentenyl-alanine olefin amino acid connected by an all-carbon crosslinker comprising one double bond
  C-term NH2
IAQALAAIGDAFNAYYA

SEQ ID NO: 1204 - protein, 17 aa, Artificial Sequence
  Description of Artificial Sequence: Synthetic peptide
  N-term Ac
  MOD_RES (7)..(7): Alpha-Me R8-octenyl-alanine olefin amino acid connected by an all-carbon crosslinker comprising one double bond
  MISC_FEATURE (7)..(14): Crosslink between residues
  MOD_RES (14)..(14): Alpha-Me S5-pentenyl-alanine olefin amino acid connected by an all-carbon crosslinker comprising one double bond
  C-term NH2
IAQALRAIADAFNAYYA

SEQ ID NO: 1205 - protein, 17 aa, Artificial Sequence
  Description of Artificial Sequence: Synthetic peptide
  N-term Ac
  MOD_RES (7)..(7): Alpha-Me R8-octenyl-alanine olefin amino acid connected by an all-carbon crosslinker comprising one double bond
  MISC_FEATURE (7)..(14): Crosslink between residues
  MOD_RES (14)..(14): Alpha-Me S5-pentenyl-alanine olefin amino acid connected by an all-carbon crosslinker comprising one double bond
  C-term NH2
IAQALRAIGDAANAYYA

SEQ ID NO: 1206 - protein, 17 aa, Artificial Sequence
  Description of Artificial Sequence: Synthetic peptide
  N-term Ac
  MOD_RES (7)..(7): Alpha-Me R8-octenyl-alanine olefin amino acid connected by an all-carbon crosslinker comprising one double bond
  MISC_FEATURE (7)..(14): Crosslink between residues
  MOD_RES (14)..(14): Alpha-Me S5-pentenyl-alanine olefin amino acid connected by an all-carbon crosslinker comprising one double bond
  C-term NH2
IAQALRAIGDAFAAYYA

SEQ ID NO: 1207 - protein, 17 aa, Artificial Sequence
  Description of Artificial Sequence: Synthetic peptide
  N-term Ac
  MOD_RES (7)..(7): Alpha-Me R8-octenyl-alanine olefin amino acid connected by an all-carbon crosslinker comprising one double bond
  MISC_FEATURE (7)..(14): Crosslink between residues
  MOD_RES (14)..(14): Alpha-Me S5-pentenyl-alanine olefin amino acid connected by an all-carbon crosslinker comprising one double bond
  C-term NH2
IAQALRAIGDAFNAAYA

SEQ ID NO: 1208 - protein, 17 aa, Artificial Sequence
  Description of Artificial Sequence: Synthetic peptide
  N-term Ac
  MOD_RES (7)..(7): Alpha-Me R8-octenyl-alanine olefin amino acid connected by an all-carbon crosslinker comprising one double bond
  MISC_FEATURE (7)..(14): Crosslink between residues
  MOD_RES (14)..(14): Alpha-Me S5-pentenyl-alanine olefin amino acid connected by an all-carbon crosslinker comprising one double bond
  C-term NH2
IAQALRAIGDAFNAYAA

SEQ ID NO: 1209 - protein, 19 aa, Artificial Sequence
  Description of Artificial Sequence: Synthetic peptide
  N-term Ac
  MOD_RES (2)..(2): Alpha-Me S5-pentenyl-alanine olefin amino acid connected by an all-carbon crosslinker comprising one double bond
  MISC_FEATURE (2)..(6): Crosslink between residues
  MOD_RES (6)..(6): Alpha-Me S5-pentenyl-alanine olefin amino acid connected by an all-carbon crosslinker comprising one double bond
  MOD_RES (9)..(9): Alpha-Me R8-octenyl-alanine olefin amino acid connected by an all-carbon crosslinker comprising one double bond
  MISC_FEATURE (9)..(16): Crosslink between residues
  MOD_RES (16)..(16): Alpha-Me S5-pentenyl-alanine olefin amino acid connected by an all-carbon crosslinker comprising one double bond
  C-term NH2
IAIALALRAIGDAFNAYYA

SEQ ID NO: 1210 - protein, 21 aa, Artificial Sequence
  Description of Artificial Sequence: Synthetic peptide
  N-term Ac
  MOD_RES (2)..(2): Alpha-Me S5-pentenyl-alanine olefin amino acid connected by an all-carbon crosslinker comprising one double bond
  MISC_FEATURE (2)..(9): Crosslink between residues
  MOD_RES (9)..(9): Alpha-Me S5-pentenyl-alanine olefin amino acid connected by an all-carbon crosslinker comprising one double bond
  MOD_RES (16)..(16): Alpha-Me S5-pentenyl-alanine olefin amino acid connected by an all-carbon crosslinker comprising one double bond
  MISC_FEATURE (16)..(20): Crosslink between residues
  MOD_RES (20)..(20): Alpha-Me S5-pentenyl-alanine olefin amino acid connected by an all-carbon crosslinker comprising one double bond
  C-term NH2
IAIALALRAIGDAFNAYYAAA

SEQ ID NO: 1211 - protein, 21 aa, Artificial Sequence
  Description of Artificial Sequence: Synthetic peptide
  N-term Ac
  MOD_RES (5)..(5): Alpha-Me S5-pentenyl-alanine olefin amino acid connected by an all-carbon crosslinker comprising one double bond
  MISC_FEATURE (5)..(9): Crosslink between residues
  MOD_RES (9)..(9): Alpha-Me S5-pentenyl-alanine olefin amino acid connected by an all-carbon crosslinker comprising one double bond
  MOD_RES (16)..(16): Alpha-Me S5-pentenyl-alanine olefin amino acid connected by an all-carbon crosslinker comprising one double bond
  MISC_FEATURE (16)..(20): Crosslink between residues
  MOD_RES (20)..(20): Alpha-Me S5-pentenyl-alanine olefin amino acid connected by an all-carbon crosslinker comprising one double bond
  C-term NH2
IWIAAALRAIGDAFNAYYAAA

SEQ ID NO: 1212 - protein, 19 aa, Artificial Sequence
  Description of Artificial Sequence: Synthetic peptide
  N-term Ac
  MOD_RES (5)..(5): Alpha-Me S5-pentenyl-alanine olefin amino acid connected by an all-carbon crosslinker comprising one double bond
  MISC_FEATURE (5)..(9): Crosslink between residues
  MOD_RES (9)..(9): Two pentenyl-alanine olefin side chains, each of which is crosslinked to another amino acid as indicated
  MISC_FEATURE (9)..(16): Crosslink between residues
  MOD_RES (16)..(16): Alpha-Me S8-octenyl-alanine olefin amino acid connected by an all-carbon crosslinker comprising one double bond
  C-term NH2
IWIAAALRAIGDAFNAYYA

SEQ ID NO: 1213 - protein, 19 aa, Artificial Sequence
  Description of Artificial Sequence: Synthetic peptide
  N-term Ac
  MOD_RES (5)..(5): Alpha-Me S5-pentenyl-alanine olefin amino acid connected by an all-carbon crosslinker comprising one double bond
  MISC_FEATURE (5)..(9): Crosslink between residues
  MOD_RES (9)..(9): Two pentenyl-alanine olefin side chains, each of which is crosslinked to another amino acid as indicated
  MISC_FEATURE (9)..(16): Crosslink between residues
  MOD_RES (13)..(13): Norleucine
  MOD_RES (16)..(16): Alpha-Me S8-octenyl-alanine olefin amino acid connected by an all-carbon crosslinker comprising one double bond
  C-term NH2
IWIAAALRAIGDLFNAYYA

SEQ ID NO: 1214 - protein, 19 aa, Artificial Sequence
  Description of Artificial Sequence: Synthetic peptide
  N-term Ac
  MOD_RES (2)..(2): Alpha-Me R8-octenyl-alanine olefin amino acid connected by an all-carbon crosslinker comprising one double bond
  MISC_FEATURE (2)..(9): Crosslink between residues
  MOD_RES (9)..(9): Two pentenyl-alanine olefin side chains, each of which is crosslinked to another amino acid as indicated
  MISC_FEATURE (9)..(16): Crosslink between residues
  MOD_RES (16)..(16): Alpha-Me S8-octenyl-alanine olefin amino acid connected by an all-carbon crosslinker comprising one double bond
  C-term NH2
IAIALALRAIGDAFNAYYA

SEQ ID NO: 1215 - protein, 19 aa, Artificial Sequence
  Description of Artificial Sequence: Synthetic peptide
  N-term Ac
  MOD_RES (2)..(2): Alpha-Me R8-octenyl-alanine olefin amino acid connected by an all-carbon crosslinker comprising one double bond
  MISC_FEATURE (2)..(9): Crosslink between residues
  MOD_RES (9)..(9): Two pentenyl-alanine olefin side chains, each of which is crosslinked to another amino acid as indicated
  MISC_FEATURE (9)..(13): Crosslink between residues
  MOD_RES (13)..(13): Alpha-Me R5-pentenyl-alanine olefin amino acid connected by an all-carbon crosslinker comprising one double bond
  C-term NH2
IAIALALRAIGDAFNAYYA

SEQ ID NO: 1216 - protein, 19 aa, Artificial Sequence
  Description of Artificial Sequence: Synthetic peptide
  N-term Ac
  MOD_RES (9)..(9): Alpha-Me S5-pentenyl-alanine olefin amino acid connected by an all-carbon crosslinker comprising one double bond
  MISC_FEATURE (9)..(13): Crosslink between residues
  MOD_RES (13)..(13): Alpha-Me S5-pentenyl-alanine olefin amino acid connected by an all-carbon crosslinker comprising one double bond
  C-term NH2
IWIALALRAIGDAFNAYYA

SEQ ID NO: 1217 - protein, 19 aa, Artificial Sequence
  Description of Artificial Sequence: Synthetic peptide
  N-term Ac
  MOD_RES (9)..(9): Alpha-Me S5-pentenyl-alanine olefin amino acid connected by an all-carbon crosslinker comprising one double bond
  MISC_FEATURE (9)..(13): Crosslink between residues
  MOD_RES (13)..(13): Alpha-Me S5-pentenyl-alanine olefin amino acid connected by an all-carbon crosslinker comprising one double bond
  C-term NH2
IWIAQALRAIGDAFNAYYA

SEQ ID NO: 1218 - protein, 20 aa, Artificial Sequence
  Description of Artificial Sequence: Synthetic peptide
  N-term Ac
  MOD_RES (2)..(2): Alpha-Me S5-pentenyl-alanine olefin amino acid connected by an all-carbon crosslinker comprising one double bond
  MISC_FEATURE (2)..(6): Crosslink between residues
  MOD_RES (6)..(6): Alpha-Me S5-pentenyl-alanine olefin amino acid connected by an all-carbon crosslinker comprising one double bond
  MOD_RES (9)..(9): 2-aminoisobutyric acid
  MOD_RES (13)..(13): 2-aminoisobutyric acid
  MOD_RES (15)..(15): Alpha-Me S5-pentenyl-alanine olefin amino acid connected by an all-carbon crosslinker comprising one double bond
  MISC_FEATURE (15)..(19): Crosslink between residues
  MOD_RES (19)..(19): Alpha-Me S5-pentenyl-alanine olefin amino acid connected by an all-carbon crosslinker comprising one double bond
  C-term NH2
IAIAAALRXIGDXFAAYYAA

SEQ ID NO: 1219 - protein, 20 aa, Artificial Sequence
  Description of Artificial Sequence: Synthetic peptide
  N-term Ac
  MOD_RES (2)..(2): Alpha-Me S5-pentenyl-alanine olefin amino acid connected by an all-carbon crosslinker comprising one double bond
  MISC_FEATURE (2)..(6): Crosslink between residues
  MOD_RES (6)..(6): Alpha-Me S5-pentenyl-alanine olefin amino acid connected by an all-carbon crosslinker comprising one double bond
  MOD_RES (9)..(9): 2-aminoisobutyric acid
  MOD_RES (13)..(13): 2-aminoisobutyric acid
  MOD_RES (15)..(15): Alpha-Me S5-pentenyl-alanine olefin amino acid connected by an all-carbon crosslinker comprising one double bond
  MISC_FEATURE (15)..(19): Crosslink between residues
  MOD_RES (19)..(19): Alpha-Me S5-pentenyl-alanine olefin amino acid connected by an all-carbon crosslinker comprising one double bond
  C-term NH2
IAIALALRXIGDXFAAYYAA

SEQ ID NO: 1220 - protein, 20 aa, Artificial Sequence
  Description of Artificial Sequence: Synthetic peptide
  N-term Ac
  MOD_RES (2)..(2): Alpha-Me R8-octenyl-alanine olefin amino acid connected by an all-carbon crosslinker comprising one double bond
  MISC_FEATURE (2)..(9): Crosslink between residues
  MOD_RES (9)..(9): Alpha-Me S5-pentenyl-alanine olefin amino acid connected by an all-carbon crosslinker comprising one double bond
  MOD_RES (15)..(15): Alpha-Me S5-pentenyl-alanine olefin amino acid connected by an all-carbon crosslinker comprising one double bond
  MISC_FEATURE (15)..(19): Crosslink between residues
  MOD_RES (19)..(19): Alpha-Me S5-pentenyl-alanine olefin amino acid connected by an all-carbon crosslinker comprising one double bond
  C-term NH2
IAIALALRAIGDAFAAYYAA

SEQ ID NO: 1221 - protein, 21 aa, Artificial Sequence
  Description of Artificial Sequence: Synthetic peptide
  N-term Ac
  MOD_RES (2)..(2): Alpha-Me R8-octenyl-alanine olefin amino acid connected by an all-carbon crosslinker comprising one double bond
  MISC_FEATURE (2)..(9): Crosslink between residues
  MOD_RES (9)..(9): Two pentenyl-alanine olefin side chains, each of which is crosslinked to another amino acid as indicated
  MISC_FEATURE (9)..(16): Crosslink between residues
  MOD_RES (16)..(16): Alpha-Me S8-octenyl-alanine olefin amino acid connected by an all-carbon crosslinker comprising one double bond
  C-term NH2
IAIAQELRAIGDAFNAYYARR

SEQ ID NO: 1222 - protein, 19 aa, Artificial Sequence
  Description of Artificial Sequence: Synthetic peptide
  N-term Ac
  MOD_RES (2)..(2): Alpha-Me R8-octenyl-alanine olefin amino acid connected by an all-carbon crosslinker comprising one double bond
  MISC_FEATURE (2)..(9): Crosslink between residues
  MOD_RES (9)..(9): Two pentenyl-alanine olefin side chains, each of which is crosslinked to another amino acid as indicated
  MISC_FEATURE (9)..(16): Crosslink between residues
  MOD_RES (16)..(16): Alpha-Me S8-octenyl-alanine olefin amino acid connected by an all-carbon crosslinker comprising one double bond
  C-term NH2
IAIAQALRAIGDAFNAYYA

SEQ ID NO: 1223 - protein, 19 aa, Artificial Sequence
  Description of Artificial Sequence: Synthetic peptide
  N-term HBS
  MOD_RES (3)..(3): N-allyl alanine after metathesis cyclization
  C-term NH2
IAAALRRIGDEFNAYYAHH

SEQ ID NO: 1224 - protein, 19 aa, Artificial Sequence
  Description of Artificial Sequence: Synthetic peptide
  N-term HBS
  MOD_RES (3)..(3): N-allyl alanine after metathesis cyclization
  MOD_RES (7)..(7): Alpha-Me S5-pentenyl-alanine olefin amino acid connected by an all-carbon crosslinker comprising one double bond
  MISC_FEATURE (7)..(11): Crosslink between residues
  MOD_RES (11)..(11): Alpha-Me S5-pentenyl-alanine olefin amino acid connected by an all-carbon crosslinker comprising one double bond
  C-term NH2
IAAALRAIGDAFNAYYAHH

SEQ ID NO: 1225 - protein, 21 aa, Artificial Sequence
  Description of Artificial Sequence: Synthetic peptide
  N-term HBS
  MOD_RES (3)..(3): N-allyl alanine after metathesis cyclization
  C-term NH2
IWAAQALRRIGDEFNAYYAHH

SEQ ID NO: 1226 - protein, 21 aa, Artificial Sequence
  Description of Artificial Sequence: Synthetic peptide
  N-term HBS
  MOD_RES (3)..(3): N-allyl alanine after metathesis cyclization
  MOD_RES (9)..(9): Alpha-Me S5-pentenyl-alanine olefin amino acid connected by an all-carbon crosslinker comprising one double bond
  MISC_FEATURE (9)..(13): Crosslink between residues
  MOD_RES (13)..(13): Alpha-Me S5-pentenyl-alanine olefin amino acid connected by an all-carbon crosslinker comprising one double bond
  C-term NH2
IWAAQALRAIGDAFNAYYAHH

SEQ ID NO: 1227 - protein, 19 aa, Artificial Sequence
  Description of Artificial Sequence: Synthetic peptide
  N-term heptenoic acid crosslinked with position 4 via an all-carbon crosslinker comprising one double bond
  MOD_RES (4)..(4): Alpha-Me S5-pentenyl-alanine olefin amino acid connected by an all-carbon crosslinker comprising one double bond
  C-term NH2
IAQALRRIGDEFNAYYAHH

SEQ ID NO: 1228 - protein, 19 aa, Artificial Sequence
  Description of Artificial Sequence: Synthetic peptide
  N-term heptenoic acid crosslinked with position 4 via an all-carbon crosslinker comprising one double bond
  MOD_RES (4)..(4): Alpha-Me S5-pentenyl-alanine olefin amino acid connected by an all-carbon crosslinker comprising one double bond
  MOD_RES (7)..(7): Alpha-Me S5-pentenyl-alanine olefin amino acid connected by an all-carbon crosslinker comprising one double bond
  MISC_FEATURE (7)..(11): Crosslink between residues
  MOD_RES (11)..(11): Alpha-Me S5-pentenyl-alanine olefin amino acid connected by an all-carbon crosslinker comprising one double bond
  C-term NH2
IAQALRAIGDAFNAYYAHH

SEQ ID NO: 1229 - protein, 19 aa, Artificial Sequence
  Description of Artificial Sequence: Synthetic peptide
  N-term heptenoic acid crosslinked with position 3 via an all-carbon crosslinker comprising one double bond
  MOD_RES (3)..(3): Alpha-Me S5-pentenyl-alanine olefin amino acid connected by an all-carbon crosslinker comprising one double bond
  MOD_RES (7)..(7): Alpha-Me S5-pentenyl-alanine olefin amino acid connected by an all-carbon crosslinker comprising one double bond
  MISC_FEATURE (7)..(11): Crosslink between residues
  MOD_RES (11)..(11): Alpha-Me S5-pentenyl-alanine olefin amino acid connected by an all-carbon crosslinker comprising one double bond
  C-term NH2
IAAALRAIGDAFNAYYAHH

SEQ ID NO: 1230 - protein, 19 aa, Artificial Sequence
  Description of Artificial Sequence: Synthetic peptide
  N-term Ac
  MOD_RES (2)..(2): Alpha-Me S5-pentenyl-alanine olefin amino acid connected by an all-carbon crosslinker comprising one double bond
  MISC_FEATURE (2)..(6): Crosslink between residues
  MOD_RES (6)..(6): Alpha-Me S5-pentenyl-alanine olefin amino acid connected by an all-carbon crosslinker comprising one double bond
  MOD_RES (9)..(9): Alpha-Me R8-octenyl-alanine olefin amino acid connected by an all-carbon crosslinker comprising one double bond
  MISC_FEATURE (9)..(16): Crosslink between residues
  MOD_RES (16)..(16): Alpha-Me S5-pentenyl-alanine olefin amino acid connected by an all-carbon crosslinker comprising one double bond
  C-term NH2
IAIAQALRAIGDEFNAYYA

SEQ ID NO: 1231 - protein, 19 aa, Artificial Sequence
  Description of Artificial Sequence: Synthetic peptide
  N-term Ac
  MOD_RES (2)..(2): Alpha-Me S5-pentenyl-alanine olefin amino acid connected by an all-carbon crosslinker comprising one double bond
  MISC_FEATURE (2)..(6): Crosslink between residues
  MOD_RES (6)..(6): Alpha-Me S5-pentenyl-alanine olefin amino acid connected by an all-carbon crosslinker comprising one double bond
  MOD_RES (9)..(9): Alpha-Me R8-octenyl-alanine olefin amino acid connected by an all-carbon crosslinker comprising one double bond
  MISC_FEATURE (9)..(16): Crosslink between residues
  MOD_RES (16)..(16): Alpha-Me S5-pentenyl-alanine olefin amino acid connected by an all-carbon crosslinker comprising one double bond
  C-term NH2
IAIAAALRAIGDEFNAYYA

SEQ ID NO: 1232 - protein, 19 aa, Artificial Sequence
  Description of Artificial Sequence: Synthetic peptide
  N-term Ac
  MOD_RES (2)..(2): Alpha-Me S5-pentenyl-alanine olefin amino acid connected by an all-carbon crosslinker comprising one double bond
  MISC_FEATURE (2)..(6): Crosslink between residues
  MOD_RES (6)..(6): Alpha-Me S5-pentenyl-alanine olefin amino acid connected by an all-carbon crosslinker comprising one double bond
  MOD_RES (9)..(9): Alpha-Me R8-octenyl-alanine olefin amino acid connected by an all-carbon crosslinker comprising one double bond
  MISC_FEATURE (9)..(16): Crosslink between residues
  MOD_RES (16)..(16): Alpha-Me S5-pentenyl-alanine olefin amino acid connected by an all-carbon crosslinker comprising one double bond
  C-term NH2
IAIAVALRAIGDEFNAYYA

SEQ ID NO: 1233 - protein, 19 aa, Artificial Sequence
  Description of Artificial Sequence: Synthetic peptide
  N-term Ac
  MOD_RES (2)..(2): Alpha-Me S5-pentenyl-alanine olefin amino acid connected by an all-carbon crosslinker comprising one double bond
  MISC_FEATURE (2)..(6): Crosslink between residues
  MOD_RES (6)..(6): Alpha-Me S5-pentenyl-alanine olefin amino acid connected by an all-carbon crosslinker comprising one double bond
  MOD_RES (9)..(9): Alpha-Me R8-octenyl-alanine olefin amino acid connected by an all-carbon crosslinker comprising one double bond
  MISC_FEATURE (9)..(16): Crosslink between residues
  MOD_RES (16)..(16): Alpha-Me S5-pentenyl-alanine olefin amino acid connected by an all-carbon crosslinker comprising one double bond
  C-term NH2
IAIAVALRAIGDEFNAYYA

SEQ ID NO: 1234 - protein, 19 aa, Artificial Sequence
  Description of Artificial Sequence: Synthetic peptide
  N-term Ac
  MOD_RES (2)..(2): Alpha-Me S5-pentenyl-alanine olefin amino acid connected by an all-carbon crosslinker comprising one double bond
  MISC_FEATURE (2)..(6): Crosslink between residues
  MOD_RES (6)..(6): Alpha-Me S5-pentenyl-alanine olefin amino acid connected by an all-carbon crosslinker comprising one double bond
  MOD_RES (9)..(9): Alpha-Me R8-octenyl-alanine olefin amino acid connected by an all-carbon crosslinker comprising one double bond
  MISC_FEATURE (9)..(16): Crosslink between residues
  MOD_RES (16)..(16): Alpha-Me S5-pentenyl-alanine olefin amino acid connected by an all-carbon crosslinker comprising one double bond
  C-term NH2
IAIAIALRAIGDEFNAYYA

SEQ ID NO: 1235 - protein, 19 aa, Artificial Sequence
  Description of Artificial Sequence: Synthetic peptide
  N-term Ac
  MOD_RES (2)..(2): Alpha-Me S5-pentenyl-alanine olefin amino acid connected by an all-carbon crosslinker comprising one double bond
  MISC_FEATURE (2)..(6): Crosslink between residues
  MOD_RES (6)..(6): Alpha-Me S5-pentenyl-alanine olefin amino acid connected by an all-carbon crosslinker comprising one double bond
  MOD_RES (9)..(9): Alpha-Me R8-octenyl-alanine olefin amino acid connected by an all-carbon crosslinker comprising one double bond
  MISC_FEATURE (9)..(16): Crosslink between residues
  MOD_RES (16)..(16): Alpha-Me S5-pentenyl-alanine olefin amino acid connected by an all-carbon crosslinker comprising one double bond
  C-term NH2
IAIAIALRAIGDEFNAYYA

SEQ ID NO: 1236 - protein, 19 aa, Artificial Sequence
  Description of Artificial Sequence: Synthetic peptide
  N-term Ac
  MOD_RES (2)..(2): Alpha-Me S5-pentenyl-alanine olefin amino acid connected by an all-carbon crosslinker comprising one double bond
  MISC_FEATURE (2)..(6): Crosslink between residues
  MOD_RES (6)..(6): Alpha-Me S5-pentenyl-alanine olefin amino acid connected by an all-carbon crosslinker comprising one double bond
  MOD_RES (9)..(9): Alpha-Me R8-octenyl-alanine olefin amino acid connected by an all-carbon crosslinker comprising one double bond
  MISC_FEATURE (9)..(16): Crosslink between residues
  MOD_RES (16)..(16): Alpha-Me S5-pentenyl-alanine olefin amino acid connected by an all-carbon crosslinker comprising one double bond
  C-term NH2
IAIAYALRAIGDEFNAYYA

SEQ ID NO: 1237 - protein, 19 aa, Artificial Sequence
  Description of Artificial Sequence: Synthetic peptide
  N-term Ac
  MOD_RES (2)..(2): Alpha-Me S5-pentenyl-alanine olefin amino acid connected by an all-carbon crosslinker comprising one double bond
  MISC_FEATURE (2)..(6): Crosslink between residues
  MOD_RES (6)..(6): Alpha-Me S5-pentenyl-alanine olefin amino acid connected by an all-carbon crosslinker comprising one double bond
  MOD_RES (9)..(9): Alpha-Me R8-octenyl-alanine olefin amino acid connected by an all-carbon crosslinker comprising one double bond
  MISC_FEATURE (9)..(16): Crosslink between residues
  MOD_RES (16)..(16): Alpha-Me S5-pentenyl-alanine olefin amino acid connected by an all-carbon crosslinker comprising one double bond
  C-term NH2
IAIALALRAIGDEFNAYYA

SEQ ID NO: 1238 - protein, 19 aa, Artificial Sequence
  Description of Artificial Sequence: Synthetic peptide
  N-term Ac
  MOD_RES (2)..(2): Alpha-Me S5-pentenyl-alanine olefin amino acid connected by an all-carbon crosslinker comprising one double bond
  MISC_FEATURE (2)..(6): Crosslink between residues
  MOD_RES (6)..(6): Alpha-Me S5-pentenyl-alanine olefin amino acid connected by an all-carbon crosslinker comprising one double bond
  MOD_RES (9)..(9): Alpha-Me R8-octenyl-alanine olefin amino acid connected by an all-carbon crosslinker comprising one double bond
  MISC_FEATURE (9)..(16): Crosslink between residues
  MOD_RES (16)..(16): Alpha-Me S5-pentenyl-alanine olefin amino acid connected by an all-carbon crosslinker comprising one double bond
  C-term NH2
IAIALALRAIGDEFNAYYA

SEQ ID NO: 1239 - protein, 19 aa, Artificial Sequence
  Description of Artificial Sequence: Synthetic peptide
  N-term Ac
  MOD_RES (2)..(2): Alpha-Me S5-pentenyl-alanine olefin amino acid connected by an all-carbon crosslinker comprising one double bond
  MISC_FEATURE (2)..(6): Crosslink between residues
  MOD_RES (6)..(6): Alpha-Me S5-pentenyl-alanine olefin amino acid connected by an all-carbon crosslinker comprising one double bond
  MOD_RES (9)..(9): Alpha-Me R8-octenyl-alanine olefin amino acid connected by an all-carbon crosslinker comprising one double bond
  MISC_FEATURE (9)..(16): Crosslink between residues
  MOD_RES (16)..(16): Alpha-Me S5-pentenyl-alanine olefin amino acid connected by an all-carbon crosslinker comprising one double bond
  C-term NH2
IAIAFALRAIGDEFNAYYA

SEQ ID NO: 1240 - protein, 19 aa, Artificial Sequence
  Description of Artificial Sequence: Synthetic peptide
  N-term Ac
  MOD_RES (2)..(2): Alpha-Me S5-pentenyl-alanine olefin amino acid connected by an all-carbon crosslinker comprising one double bond
  MISC_FEATURE (2)..(6): Crosslink between residues
  MOD_RES (6)..(6): Alpha-Me S5-pentenyl-alanine olefin amino acid connected by an all-carbon crosslinker comprising one double bond
  MOD_RES (9)..(9): Alpha-Me R8-octenyl-alanine olefin amino acid connected by an all-carbon crosslinker comprising one double bond
  MISC_FEATURE (9)..(16): Crosslink between residues
  MOD_RES (16)..(16): Alpha-Me S5-pentenyl-alanine olefin amino acid connected by an all-carbon crosslinker comprising one double bond
  C-term NH2
IAIAFALRAIGDEFNAYYA

SEQ ID NO: 1241 - protein, 19 aa, Artificial Sequence
  Description of Artificial Sequence: Synthetic peptide
  N-term Ac
  MOD_RES (2)..(2): Alpha-Me S5-pentenyl-alanine olefin amino acid connected by an all-carbon crosslinker comprising one double bond
  MISC_FEATURE (2)..(6): Crosslink between residues
  MOD_RES (6)..(6): Alpha-Me S5-pentenyl-alanine olefin amino acid connected by an all-carbon crosslinker comprising one double bond
  MOD_RES (9)..(9): Alpha-Me R8-octenyl-alanine olefin amino acid connected by an all-carbon crosslinker comprising one double bond
  MISC_FEATURE (9)..(16): Crosslink between residues
  MOD_RES (16)..(16): Alpha-Me S5-pentenyl-alanine olefin amino acid connected by an all-carbon crosslinker comprising one double bond
  C-term NH2
IAIAQALRAIGDAFNAYYA

SEQ ID NO: 1242 - protein, 19 aa, Artificial Sequence
  Description of Artificial Sequence: Synthetic peptide
  N-term Ac
  MOD_RES (2)..(2): Alpha-Me S5-pentenyl-alanine olefin amino acid connected by an all-carbon crosslinker comprising one double bond
  MISC_FEATURE (2)..(6): Crosslink between residues
  MOD_RES (6)..(6): Alpha-Me S5-pentenyl-alanine olefin amino acid connected by an all-carbon crosslinker comprising one double bond
  MOD_RES (9)..(9): Alpha-Me R8-octenyl-alanine olefin amino acid connected by an all-carbon crosslinker comprising one double bond
  MISC_FEATURE (9)..(16): Crosslink between residues
  MOD_RES (13)..(13): Norleucine
  MOD_RES (16)..(16): Alpha-Me S5-pentenyl-alanine olefin amino acid connected by an all-carbon crosslinker comprising one double bond
  C-term NH2
IAIAQALRAIGDLFNAYYA

SEQ ID NO: 1243 - protein, 19 aa, Artificial Sequence
  Description of Artificial Sequence: Synthetic peptide
  N-term Ac
  MOD_RES (2)..(2): Alpha-Me S5-pentenyl-alanine olefin amino acid connected by an all-carbon crosslinker comprising one double bond
  MISC_FEATURE (2)..(6): Crosslink between residues
  MOD_RES (6)..(6): Alpha-Me S5-pentenyl-alanine olefin amino acid connected by an all-carbon crosslinker comprising one double bond
  MOD_RES (9)..(9): Alpha-Me R8-octenyl-alanine olefin amino acid connected by an all-carbon crosslinker comprising one double bond
  MISC_FEATURE (9)..(16): Crosslink between residues
  MOD_RES (13)..(13): 2-aminoisobutyric acid
  MOD_RES (16)..(16): Alpha-Me S5-pentenyl-alanine olefin amino acid connected by an all-carbon crosslinker comprising one double bond
  C-term NH2
IAIAQALRAIGDXFNAYYA

SEQ ID NO: 1244 - protein, 19 aa, Artificial Sequence
  Description of Artificial Sequence: Synthetic peptide
  N-term Ac
  MOD_RES (2)..(2): Alpha-Me S5-pentenyl-alanine olefin amino acid connected by an all-carbon crosslinker comprising one double bond
  MISC_FEATURE (2)..(6): Crosslink between residues
  MOD_RES (6)..(6): Alpha-Me S5-pentenyl-alanine olefin amino acid connected by an all-carbon crosslinker comprising one double bond
  MOD_RES (15)..(15): Alpha-Me S5-pentenyl-alanine olefin amino acid connected by an all-carbon crosslinker comprising one double bond
  MISC_FEATURE (15)..(19): Crosslink between residues
  MOD_RES (19)..(19): Alpha-Me S5-pentenyl-alanine olefin amino acid connected by an all-carbon crosslinker comprising one double bond
  C-term NH2
IAIAQALRRIGDEFAAYYA

SEQ ID NO: 1245 - protein, 19 aa, Artificial Sequence
  Description of Artificial Sequence: Synthetic peptide
  N-term Ac
  MOD_RES (2)..(2): Alpha-Me S5-pentenyl-alanine olefin amino acid connected by an all-carbon crosslinker comprising one double bond
  MISC_FEATURE (2)..(6): Crosslink between residues
  MOD_RES (6)..(6): Alpha-Me S5-pentenyl-alanine olefin amino acid connected by an all-carbon crosslinker comprising one double bond
  MOD_RES (15)..(15): Alpha-Me S5-pentenyl-alanine olefin amino acid connected by an all-carbon crosslinker comprising one double bond
  MISC_FEATURE (15)..(19): Crosslink between residues
  MOD_RES (19)..(19): Alpha-Me S5-pentenyl-alanine olefin amino acid connected by an all-carbon crosslinker comprising one double bond
  C-term NH2
IAIAAALRRIGDEFAAYYA

SEQ ID NO: 1246 - protein, 19 aa, Artificial Sequence
  Description of Artificial Sequence: Synthetic peptide
  N-term Ac
  MOD_RES (2)..(2): Alpha-Me S5-pentenyl-alanine olefin amino acid connected by an all-carbon crosslinker comprising one double bond
  MISC_FEATURE (2)..(6): Crosslink between residues
  MOD_RES (6)..(6): Alpha-Me S5-pentenyl-alanine olefin amino acid connected by an all-carbon crosslinker comprising one double bond
  MOD_RES (15)..(15): Alpha-Me S5-pentenyl-alanine olefin amino acid connected by an all-carbon crosslinker comprising one double bond
  MISC_FEATURE (15)..(19): Crosslink between residues
  MOD_RES (19)..(19): Alpha-Me S5-pentenyl-alanine olefin amino acid connected by an all-carbon crosslinker comprising one double bond
  C-term NH2
IAIAVALRRIGDEFAAYYA

SEQ ID NO: 1247 - protein, 19 aa, Artificial Sequence
  Description of Artificial Sequence: Synthetic peptide
  N-term Ac
  MOD_RES (2)..(2): Alpha-Me S5-pentenyl-alanine olefin amino acid connected by an all-carbon crosslinker comprising one double bond
  MISC_FEATURE (2)..(6): Crosslink between residues
  MOD_RES (6)..(6): Alpha-Me S5-pentenyl-alanine olefin amino acid connected by an all-carbon crosslinker comprising one double bond
  MOD_RES (15)..(15): Alpha-Me S5-pentenyl-alanine olefin amino acid connected by an all-carbon crosslinker comprising one double bond
  MISC_FEATURE (15)..(19): Crosslink between residues
  MOD_RES (19)..(19): Alpha-Me S5-pentenyl-alanine olefin amino acid connected by an all-carbon crosslinker comprising one double bond
  C-term NH2
IAIALALRRIGDEFAAYYA

SEQ ID NO: 1248 - protein, 19 aa, Artificial Sequence
  Description of Artificial Sequence: Synthetic peptide
  N-term Ac
  MOD_RES (2)..(2): Alpha-Me S5-pentenyl-alanine olefin amino acid connected by an all-carbon crosslinker comprising one double bond
  MISC_FEATURE (2)..(6): Crosslink between residues
  MOD_RES (6)..(6): Alpha-Me S5-pentenyl-alanine olefin amino acid connected by an all-carbon crosslinker comprising one double bond
  MOD_RES (15)..(15): Alpha-Me S5-pentenyl-alanine olefin amino acid connected by an all-carbon crosslinker comprising one double bond
  MISC_FEATURE (15)..(19): Crosslink between residues
  MOD_RES (19)..(19): Alpha-Me S5-pentenyl-alanine olefin amino acid connected by an all-carbon crosslinker comprising one double bond
  C-term NH2
IAIAIALRRIGDEFAAYYA

SEQ ID NO: 1249 - protein, 19 aa, Artificial Sequence
  Description of Artificial Sequence: Synthetic peptide
  N-term Ac
  MOD_RES (2)..(2): Alpha-Me S5-pentenyl-alanine olefin amino acid connected by an all-carbon crosslinker comprising one double bond
  MISC_FEATURE (2)..(6): Crosslink between residues
  MOD_RES (6)..(6): Alpha-Me S5-pentenyl-alanine olefin amino acid connected by an all-carbon crosslinker comprising one double bond
  MOD_RES (15)..(15): Alpha-Me S5-pentenyl-alanine olefin amino acid connected by an all-carbon crosslinker comprising one double bond
  MISC_FEATURE (15)..(19): Crosslink between residues
  MOD_RES (19)..(19): Alpha-Me S5-pentenyl-alanine olefin amino acid connected by an all-carbon crosslinker comprising one double bond
  C-term NH2
IAIAFALRRIGDEFAAYYA

SEQ ID NO: 1250 - protein, 19 aa, Artificial Sequence
  Description of Artificial Sequence: Synthetic peptide
  N-term Ac
  MOD_RES (2)..(2): Alpha-Me S5-pentenyl-alanine olefin amino acid connected by an all-carbon crosslinker comprising one double bond
  MISC_FEATURE (2)..(6): Crosslink between residues
  MOD_RES (6)..(6): Alpha-Me S5-pentenyl-alanine olefin amino acid connected by an all-carbon crosslinker comprising one double bond
  MOD_RES (15)..(15): Alpha-Me S5-pentenyl-alanine olefin amino acid connected by an all-carbon crosslinker comprising one double bond
  MISC_FEATURE (15)..(19): Crosslink between residues
  MOD_RES (19)..(19): Alpha-Me S5-pentenyl-alanine olefin amino acid connected by an all-carbon crosslinker comprising one double bond
  C-term NH2
IAIAYALRRIGDEFAAYYA

SEQ ID NO: 1251 - protein, 19 aa, Artificial Sequence
  Description of Artificial Sequence: Synthetic peptide
  N-term Ac
  MOD_RES (2)..(2): Alpha-Me S5-pentenyl-alanine olefin amino acid connected by an all-carbon crosslinker comprising one double bond
  MISC_FEATURE (2)..(6): Crosslink between residues
  MOD_RES (6)..(6): Alpha-Me S5-pentenyl-alanine olefin amino acid connected by an all-carbon crosslinker comprising one double bond
  MOD_RES (15)..(15): Alpha-Me S5-pentenyl-alanine olefin amino acid connected by an all-carbon crosslinker comprising one double bond
  MISC_FEATURE (15)..(19): Crosslink between residues
  MOD_RES (19)..(19): Alpha-Me S5-pentenyl-alanine olefin amino acid connected by an all-carbon crosslinker comprising one double bond
  C-term NH2
IAIAGALRRIGDEFAAYYA

SEQ ID NO: 1252 - protein, 19 aa, Artificial Sequence
  Description of Artificial Sequence: Synthetic peptide
  N-term Ac
  MOD_RES (2)..(2): Alpha-Me S5-pentenyl-alanine olefin amino acid connected by an all-carbon crosslinker comprising one double bond
  MISC_FEATURE (2)..(6): Crosslink between residues
  MOD_RES (6)..(6): Alpha-Me S5-pentenyl-alanine olefin amino acid connected by an all-carbon crosslinker comprising one double bond
  MOD_RES (15)..(15): Alpha-Me S5-pentenyl-alanine olefin amino acid connected by an all-carbon crosslinker comprising one double bond
  MISC_FEATURE (15)..(19): Crosslink between residues
  MOD_RES (19)..(19): Alpha-Me S5-pentenyl-alanine olefin amino acid connected by an all-carbon crosslinker comprising one double bond
  C-term NH2
IAIAQALRAIGDAFAAYYA

SEQ ID NO: 1253 - protein, 19 aa, Artificial Sequence
  Description of Artificial Sequence: Synthetic peptide
  N-term Ac
  MOD_RES (2)..(2): Alpha-Me S5-pentenyl-alanine olefin amino acid connected by an all-carbon crosslinker comprising one double bond
  MISC_FEATURE (2)..(6): Crosslink between residues
  MOD_RES (6)..(6): Alpha-Me S5-pentenyl-alanine olefin amino acid connected by an all-carbon crosslinker comprising one double bond
  MOD_RES (13)..(13): 2-aminoisobutyric acid
  MOD_RES (15)..(15): Alpha-Me S5-pentenyl-alanine olefin amino acid connected by an all-carbon crosslinker comprising one double bond
  MISC_FEATURE (15)..(19): Crosslink between residues
  MOD_RES (19)..(19): Alpha-Me S5-pentenyl-alanine olefin amino acid connected by an all-carbon crosslinker comprising one double bond
  C-term NH2
IAIAQALRAIGDXFAAYYA

SEQ ID NO: 1254 - protein, 19 aa, Artificial Sequence
  Description of Artificial Sequence: Synthetic peptide
  N-term Ac
  MOD_RES (2)..(2): Alpha-Me S5-pentenyl-alanine olefin amino acid connected by an all-carbon crosslinker comprising one double bond
  MISC_FEATURE (2)..(6): Crosslink between residues
  MOD_RES (6)..(6): Alpha-Me S5-pentenyl-alanine olefin amino acid connected by an all-carbon crosslinker comprising one double bond
  MOD_RES (9)..(9): 2-aminoisobutyric acid
  MOD_RES (15)..(15): Alpha-Me S5-pentenyl-alanine olefin amino acid connected by an all-carbon crosslinker comprising one double bond
  MISC_FEATURE (15)..(19): Crosslink between residues
  MOD_RES (19)..(19): Alpha-Me S5-pentenyl-alanine olefin amino acid connected by an all-carbon crosslinker comprising one double bond
  C-term NH2
IAIAQALRXIGDAFAAYYA

SEQ ID NO: 1255 - protein, 19 aa, Artificial Sequence
  Description of Artificial Sequence: Synthetic peptide
  N-term Ac
  MOD_RES (2)..(2): Alpha-Me S5-pentenyl-alanine olefin amino acid connected by an all-carbon crosslinker comprising one double bond
  MISC_FEATURE (2)..(6): Crosslink between residues
  MOD_RES (6)..(6): Alpha-Me S5-pentenyl-alanine olefin amino acid connected by an all-carbon crosslinker comprising one double bond
  MOD_RES (9)..(9): 2-aminoisobutyric acid
  MOD_RES (13)..(13): 2-aminoisobutyric acid
  MOD_RES (15)..(15): Alpha-Me S5-pentenyl-alanine olefin amino acid connected by an all-carbon crosslinker comprising one double bond
  MISC_FEATURE (15)..(19): Crosslink between residues
  MOD_RES (19)..(19): Alpha-Me S5-pentenyl-alanine olefin amino acid connected by an all-carbon crosslinker comprising one double bond
  C-term NH2
IAIAQALRXIGDXFAAYYA

SEQ ID NO: 1256 - protein, 19 aa, Artificial Sequence
  Description of Artificial Sequence: Synthetic peptide
  N-term Ac
  MOD_RES (2)..(2): Alpha-Me S5-pentenyl-alanine olefin amino acid connected by an all-carbon crosslinker comprising one double bond
  MISC_FEATURE (2)..(6): Crosslink between residues
  MOD_RES (6)..(6): Alpha-Me S5-pentenyl-alanine olefin amino acid connected by an all-carbon crosslinker comprising one double bond
  MOD_RES (9)..(9): Norleucine
  MOD_RES (13)..(13): Norleucine
  MOD_RES (15)..(15): Alpha-Me S5-pentenyl-alanine olefin amino acid connected by an all-carbon crosslinker comprising one double bond
  MISC_FEATURE (15)..(19): Crosslink between residues
  MOD_RES (19)..(19): Alpha-Me S5-pentenyl-alanine olefin amino acid connected by an all-carbon crosslinker comprising one double bond
  C-term NH2
IAIAQALRLIGDLFAAYYA

SEQ ID NO: 1257 - protein, 19 aa, Artificial Sequence
  Description of Artificial Sequence: Synthetic peptide
  N-term Ac
  MOD_RES (2)..(2): Alpha-Me S5-pentenyl-alanine olefin amino acid connected by an all-carbon crosslinker comprising one double bond
  MISC_FEATURE (2)..(6): Crosslink between residues
  MOD_RES (6)..(6): Alpha-Me S5-pentenyl-alanine olefin amino acid connected by an all-carbon crosslinker comprising one double bond
  MOD_RES (9)..(9): Norleucine
  MOD_RES (13)..(13): 2-aminoisobutyric acid
  MOD_RES (15)..(15): Alpha-Me S5-pentenyl-alanine olefin amino acid connected by an all-carbon crosslinker comprising one double bond
  MISC_FEATURE (15)..(19): Crosslink between residues
  MOD_RES (19)..(19): Alpha-Me S5-pentenyl-alanine olefin amino acid connected by an all-carbon crosslinker comprising one double bond
  C-term NH2
IAIAQALRLIGDXFAAYYA

SEQ ID NO: 1258 - protein, 19 aa, Artificial Sequence
  Description of Artificial Sequence: Synthetic peptide
  N-term Ac
  MOD_RES (2)..(2): Alpha-Me S5-pentenyl-alanine olefin amino acid connected by an all-carbon crosslinker comprising one double bond
  MISC_FEATURE (2)..(6): Crosslink between residues
  MOD_RES (6)..(6): Alpha-Me S5-pentenyl-alanine olefin amino acid connected by an all-carbon crosslinker comprising one double bond
  MOD_RES (9)..(9): 2-aminoisobutyric acid
  MOD_RES (13)..(13): Norleucine
  MOD_RES (15)..(15): Alpha-Me S5-pentenyl-alanine olefin amino acid connected by an all-carbon crosslinker comprising one double bond
  MISC_FEATURE (15)..(19): Crosslink between residues
  MOD_RES (19)..(19): Alpha-Me S5-pentenyl-alanine olefin amino acid connected by an all-carbon crosslinker comprising one double bond
  C-term NH2
IAIAQALRXIGDLFAAYYA

SEQ ID NO: 1259 - protein, 20 aa, Artificial Sequence
  Description of Artificial Sequence: Synthetic peptide
  N-term Ac
  MOD_RES (5)..(5): Alpha-Me S5-pentenyl-alanine olefin amino acid connected by an all-carbon crosslinker comprising one double bond
  MISC_FEATURE (5)..(9): Crosslink between residues
  MOD_RES (9)..(9): Alpha-Me S5-pentenyl-alanine olefin amino acid connected by an all-carbon crosslinker comprising one double bond
  MOD_RES (13)..(13): Alpha-Me R8-octenyl-alanine olefin amino acid connected by an all-carbon crosslinker comprising one double bond
  MISC_FEATURE (13)..(20): Crosslink between residues
  MOD_RES (20)..(20): Alpha-Me S5-pentenyl-alanine olefin amino acid connected by an all-carbon crosslinker comprising one double bond
  C-term NH2
IWIAAALRAIGDAFNAYYAA

SEQ ID NO: 1260 - protein, 20 aa, Artificial Sequence
  Description of Artificial Sequence: Synthetic peptide
  N-term Ac
  MOD_RES (5)..(5): Alpha-Me S5-pentenyl-alanine olefin amino acid connected by an all-carbon crosslinker comprising one double bond
  MISC_FEATURE (5)..(9): Crosslink between residues
  MOD_RES (9)..(9): Alpha-Me S5-pentenyl-alanine olefin amino acid connected by an all-carbon crosslinker comprising one double bond
  MOD_RES (13)..(13): Alpha-Me R8-octenyl-alanine olefin amino acid connected by an all-carbon crosslinker comprising one double bond
  MISC_FEATURE (13)..(20): Crosslink between residues
  MOD_RES (20)..(20): Alpha-Me S5-pentenyl-alanine olefin amino acid connected by an all-carbon crosslinker comprising one double bond
  C-term NH2
IWIAAVLRAIGDAFNAYYAA

SEQ ID NO: 1261 - protein, 20 aa, Artificial Sequence
  Description of Artificial Sequence: Synthetic peptide
  N-term Ac
  MOD_RES (5)..(5): Alpha-Me S5-pentenyl-alanine olefin amino acid connected by an all-carbon crosslinker comprising one double bond
  MISC_FEATURE (5)..(9): Crosslink between residues
  MOD_RES (9)..(9): Alpha-Me S5-pentenyl-alanine olefin amino acid connected by an all-carbon crosslinker comprising one double bond
  MOD_RES (13)..(13): Alpha-Me R8-octenyl-alanine olefin amino acid connected by an all-carbon crosslinker comprising one double bond
  MISC_FEATURE (13)..(20): Crosslink between residues
  MOD_RES (20)..(20): Alpha-Me S5-pentenyl-alanine olefin amino acid connected by an all-carbon crosslinker comprising one double bond
  C-term NH2
IWIAALLRAIGDAFNAYYAA

SEQ ID NO: 1262 - protein, 20 aa, Artificial Sequence
  Description of Artificial Sequence: Synthetic peptide
  N-term Ac
  MOD_RES (5)..(5): Alpha-Me S5-pentenyl-alanine olefin amino acid connected by an all-carbon crosslinker comprising one double bond
  MISC_FEATURE (5)..(9): Crosslink between residues
  MOD_RES (9)..(9): Alpha-Me S5-pentenyl-alanine olefin amino acid connected by an all-carbon crosslinker comprising one double bond
  MOD_RES (13)..(13): Alpha-Me R8-octenyl-alanine olefin amino acid connected by an all-carbon crosslinker comprising one double bond
  MISC_FEATURE (13)..(20): Crosslink between residues
  MOD_RES (20)..(20): Alpha-Me S5-pentenyl-alanine olefin amino acid connected by an all-carbon crosslinker comprising one double bond
  C-term NH2
IWIAAILRAIGDAFNAYYAA

SEQ ID NO: 1263 - protein, 20 aa, Artificial Sequence
  Description of Artificial Sequence: Synthetic peptide
  N-term Ac
  MOD_RES (5)..(5): Alpha-Me S5-pentenyl-alanine olefin amino acid connected by an all-carbon crosslinker comprising one double bond
  MISC_FEATURE (5)..(9): Crosslink between residues
  MOD_RES (9)..(9): Alpha-Me S5-pentenyl-alanine olefin amino acid connected by an all-carbon crosslinker comprising one double bond
  MOD_RES (13)..(13): Alpha-Me R8-octenyl-alanine olefin amino acid connected by an all-carbon crosslinker comprising one double bond
  MISC_FEATURE (13)..(20): Crosslink between residues
  MOD_RES (20)..(20): Alpha-Me S5-pentenyl-alanine olefin amino acid connected by an all-carbon crosslinker comprising one double bond
  C-term NH2
IWIAAFLRAIGDAFNAYYAA

SEQ ID NO: 1264 - protein, 20 aa, Artificial Sequence
  Description of Artificial Sequence: Synthetic peptide
  N-term Ac
  MOD_RES (5)..(5): Alpha-Me S5-pentenyl-alanine olefin amino acid connected by an all-carbon crosslinker comprising one double bond
  MISC_FEATURE (5)..(9): Crosslink between residues
  MOD_RES (9)..(9): Alpha-Me S5-pentenyl-alanine olefin amino acid connected by an all-carbon crosslinker comprising one double bond
  MOD_RES (13)..(13): Alpha-Me R8-octenyl-alanine olefin amino acid connected by an all-carbon crosslinker comprising one double bond
  MISC_FEATURE (13)..(20): Crosslink between residues
  MOD_RES (20)..(20): Alpha-Me S5-pentenyl-alanine olefin amino acid connected by an all-carbon crosslinker comprising one double bond
  C-term NH2
IWIAAYLRAIGDAFNAYYAA

SEQ ID NO: 1265 - protein, 20 aa, Artificial Sequence
  Description of Artificial Sequence: Synthetic peptide
  N-term Ac
  MOD_RES (5)..(5): Alpha-Me S5-pentenyl-alanine olefin amino acid connected by an all-carbon crosslinker comprising one double bond
  MISC_FEATURE (5)..(9): Crosslink between residues
  MOD_RES (9)..(9): Alpha-Me S5-pentenyl-alanine olefin amino acid connected by an all-carbon crosslinker comprising one double bond
  MOD_RES (13)..(13): Alpha-Me R8-octenyl-alanine olefin amino acid connected by an all-carbon crosslinker comprising one double bond
  MISC_FEATURE (13)..(20): Crosslink between residues
  MOD_RES (20)..(20): Alpha-Me S5-pentenyl-alanine olefin amino acid connected by an all-carbon crosslinker comprising one double bond
  C-term NH2
IWIAAGLRAIGDAFNAYYAA

SEQ ID NO: 1266 - protein, 20 aa, Artificial Sequence
  Description of Artificial Sequence: Synthetic peptide
  N-term Ac
  MOD_RES (5)..(5): Alpha-Me S5-pentenyl-alanine olefin amino acid connected by an all-carbon crosslinker comprising one double bond
  MISC_FEATURE (5)..(9): Crosslink between residues
  MOD_RES (9)..(9): Alpha-Me S5-pentenyl-alanine olefin amino acid connected by an all-carbon crosslinker comprising one double bond
  MOD_RES (13)..(13): Alpha-Me R8-octenyl-alanine olefin amino acid connected by an all-carbon crosslinker comprising one double bond
  MISC_FEATURE (13)..(20): Crosslink between residues
  MOD_RES (20)..(20): Alpha-Me S5-pentenyl-alanine olefin amino acid connected by an all-carbon crosslinker comprising one double bond
  C-term NH2
IWIAASLRAIGDAFNAYYAA

SEQ ID NO: 1267 - protein, 21 aa, Artificial Sequence
  Description of Artificial Sequence: Synthetic peptide
  N-term Ac
  MOD_RES (2)..(2): Alpha-Me R8-octenyl-alanine olefin amino acid connected by an all-carbon crosslinker comprising one double bond
  MISC_FEATURE (2)..(9): Crosslink between residues
  MOD_RES (9)..(9): Alpha-Me S5-pentenyl-alanine olefin amino acid connected by an all-carbon crosslinker comprising one double bond
  MOD_RES (16)..(16): Alpha-Me S5-pentenyl-alanine olefin amino acid connected by an all-carbon crosslinker comprising one double bond
  MISC_FEATURE (16)..(20): Crosslink between residues
  MOD_RES (20)..(20): Alpha-Me S5-pentenyl-alanine olefin amino acid connected by an all-carbon crosslinker comprising one double bond
  C-term NH2
IAIALALRAIGDAFNAYYAAA

SEQ ID NO: 1268 - protein, 19 aa, Artificial Sequence
  Description of Artificial Sequence: Synthetic peptide
  N-term Ac
  MOD_RES (5)..(5): Alpha-Me R5-pentenyl-alanine olefin amino acid connected by an all-carbon crosslinker comprising one double bond
  MISC_FEATURE (5)..(9): Crosslink between residues
  MOD_RES (9)..(9): Two pentenyl-alanine olefin side chains, each of which is crosslinked to another amino acid as indicated
  MISC_FEATURE (9)..(16): Crosslink between residues
  MOD_RES (13)..(13): Norleucine
  MOD_RES (16)..(16): Alpha-Me R8-octenyl-alanine olefin amino acid connected by an all-carbon crosslinker comprising one double bond
  C-term NH2
IWIAAALRAIGDLFNAYYA

SEQ ID NO: 1269 - protein, 19 aa, Artificial Sequence
  Description of Artificial Sequence: Synthetic peptide
  N-term Ac
  MOD_RES (2)..(2): Alpha-Me S5-pentenyl-alanine olefin amino acid connected by an all-carbon crosslinker comprising one double bond
  MISC_FEATURE (2)..(6): Crosslink between residues
  MOD_RES (6)..(6): Alpha-Me S5-pentenyl-alanine olefin amino acid connected by an all-carbon crosslinker comprising one double bond
  MOD_RES (9)..(9): Alpha-Me R8-octenyl-alanine olefin amino acid connected by an all-carbon crosslinker comprising one double bond
  MISC_FEATURE (9)..(16): Crosslink between residues
  MOD_RES (16)..(16): Alpha-Me S5-pentenyl-alanine olefin amino acid connected by an all-carbon crosslinker comprising one double bond
  C-term NH2
IAIALALRAIGDAFNAYYA

SEQ ID NO: 1270 - protein, 21 aa, Artificial Sequence
  Description of Artificial Sequence: Synthetic peptide
  N-term Ac
  MOD_RES (2)..(2): (S)-2-amino-3-(7-(diethylamino)-2-oxo-2H-chromene-3- carboxamido)propanoic acid
  MOD_RES (9)..(9): Alpha-Me R5-pentenyl-alanine olefin amino acid connected by an all-carbon crosslinker comprising one double bond
  MISC_FEATURE (9)..(13): Crosslink between residues
  MOD_RES (13)..(13): Two pentenyl-alanine olefin side chains, each of which is crosslinked to another amino acid as indicated
  MISC_FEATURE (13)..(17): Crosslink between residues
  MOD_RES (17)..(17): Alpha-Me S5-pentenyl-alanine olefin amino acid connected by an all-carbon crosslinker comprising one double bond
  C-term NH2
IXIAQALRAIGDAFNAAYAHH

SEQ ID NO: 1271 - protein, 19 aa, Artificial Sequence
  Description of Artificial Sequence: Synthetic peptide
  N-term Ac
  MOD_RES (2)..(2): Alpha-Me S5-pentenyl-alanine olefin amino acid connected by an all-carbon crosslinker comprising one double bond
  MISC_FEATURE (2)..(6): Crosslink between residues
  MOD_RES (6)..(6): Alpha-Me S5-pentenyl-alanine olefin amino acid connected by an all-carbon crosslinker comprising one double bond
  MOD_RES (15)..(15): Alpha-Me S5-pentenyl-alanine olefin amino acid connected by an all-carbon crosslinker comprising one double bond
  MISC_FEATURE (15)..(19): Crosslink between residues
  MOD_RES (19)..(19): Alpha-Me S5-pentenyl-alanine olefin amino acid connected by an all-carbon crosslinker comprising one double bond
  C-term NH2
IAIAQALRAIGDAFAAYYA

SEQ ID NO: 1272 - protein, 19 aa, Artificial Sequence
  Description of Artificial Sequence: Synthetic peptide
  N-term Ac
  MOD_RES (2)..(2): Alpha-Me S5-pentenyl-alanine olefin amino acid connected by an all-carbon crosslinker comprising one double bond
  MISC_FEATURE (2)..(6): Crosslink between residues
  MOD_RES (6)..(6): Alpha-Me S5-pentenyl-alanine olefin amino acid connected by an all-carbon crosslinker comprising one double bond
  MOD_RES (13)..(13): 2-aminoisobutyric acid
  MOD_RES (15)..(15): Alpha-Me S5-pentenyl-alanine olefin amino acid connected by an all-carbon crosslinker comprising one double bond
  MISC_FEATURE (15)..(19): Crosslink between residues
  MOD_RES (19)..(19): Alpha-Me S5-pentenyl-alanine olefin amino acid connected by an all-carbon crosslinker comprising one double bond
  C-term NH2
IAIAQALRAIGDXFAAYYA

SEQ ID NO: 1273 - protein, 19 aa, Artificial Sequence
  Description of Artificial Sequence: Synthetic peptide
  N-term Ac
  MOD_RES (2)..(2): Alpha-Me S5-pentenyl-alanine olefin amino acid connected by an all-carbon crosslinker comprising one double bond
  MISC_FEATURE (2)..(6): Crosslink between residues
  MOD_RES (6)..(6): Alpha-Me S5-pentenyl-alanine olefin amino acid connected by an all-carbon crosslinker comprising one double bond
  MOD_RES (13)..(13): 2-aminoisobutyric acid
  MOD_RES (15)..(15): Alpha-Me S5-pentenyl-alanine olefin amino acid connected by an all-carbon crosslinker comprising one double bond
  MISC_FEATURE (15)..(19): Crosslink between residues
  MOD_RES (19)..(19): Alpha-Me S5-pentenyl-alanine olefin amino acid connected by an all-carbon crosslinker comprising one double bond
  C-term NH2
IAIAQALRAIGDXFAAYYA

SEQ ID NO: 1274 - protein, 19 aa, Artificial Sequence
  Description of Artificial Sequence: Synthetic peptide
  N-term Ac
  MOD_RES (2)..(2): Alpha-Me S5-pentenyl-alanine olefin amino acid connected by an all-carbon crosslinker comprising one double bond
  MISC_FEATURE (2)..(6): Crosslink between residues
  MOD_RES (6)..(6): Alpha-Me S5-pentenyl-alanine olefin amino acid connected by an all-carbon crosslinker comprising one double bond
  MOD_RES (9)..(9): 2-aminoisobutyric acid
  MOD_RES (15)..(15): Alpha-Me S5-pentenyl-alanine olefin amino acid connected by an all-carbon crosslinker comprising one double bond
  MISC_FEATURE (15)..(19): Crosslink between residues
  MOD_RES (19)..(19): Alpha-Me S5-pentenyl-alanine olefin amino acid connected by an all-carbon crosslinker comprising one double bond
  C-term NH2
IAIAQALRXIGDAFAAYYA

SEQ ID NO: 1275 - protein, 19 aa, Artificial Sequence
  Description of Artificial Sequence: Synthetic peptide
  N-term Ac
  MOD_RES (2)..(2): Alpha-Me S5-pentenyl-alanine olefin amino acid connected by an all-carbon crosslinker comprising one double bond
  MISC_FEATURE (2)..(6): Crosslink between residues
  MOD_RES (6)..(6): Alpha-Me S5-pentenyl-alanine olefin amino acid connected by an all-carbon crosslinker comprising one double bond
  MOD_RES (9)..(9): 2-aminoisobutyric acid
  MOD_RES (15)..(15): Alpha-Me S5-pentenyl-alanine olefin amino acid connected by an all-carbon crosslinker comprising one double bond
  MISC_FEATURE (15)..(19): Crosslink between residues
  MOD_RES (19)..(19): Alpha-Me S5-pentenyl-alanine olefin amino acid connected by an all-carbon crosslinker comprising one double bond
  C-term NH2
IAIAQALRXIGDAFAAYYA

SEQ ID NO: 1276 - protein, 19 aa, Artificial Sequence
  Description of Artificial Sequence: Synthetic peptide
  N-term Ac
  MOD_RES (2)..(2): Alpha-Me S5-pentenyl-alanine olefin amino acid connected by an all-carbon crosslinker comprising one double bond
  MISC_FEATURE (2)..(6): Crosslink between residues
  MOD_RES (6)..(6): Alpha-Me S5-pentenyl-alanine olefin amino acid connected by an all-carbon crosslinker comprising one double bond
  MOD_RES (9)..(9): 2-aminoisobutyric acid
  MOD_RES (13)..(13): 2-aminoisobutyric acid
  MOD_RES (15)..(15): Alpha-Me S5-pentenyl-alanine olefin amino acid connected by an all-carbon crosslinker comprising one double bond
  MISC_FEATURE (15)..(19): Crosslink between residues
  MOD_RES (19)..(19): Alpha-Me S5-pentenyl-alanine olefin amino acid connected by an all-carbon crosslinker comprising one double bond
  C-term NH2
IAIAQALRXIGDXFAAYYA

SEQ ID NO: 1277 - protein, 19 aa, Artificial Sequence
  Description of Artificial Sequence: Synthetic peptide
  N-term Ac
  MOD_RES (2)..(2): Alpha-Me S5-pentenyl-alanine olefin amino acid connected by an all-carbon crosslinker comprising one double bond
  MISC_FEATURE (2)..(6): Crosslink between residues
  MOD_RES (6)..(6): Alpha-Me S5-pentenyl-alanine olefin amino acid connected by an all-carbon crosslinker comprising one double bond
  MOD_RES (9)..(9): 2-aminoisobutyric acid
  MOD_RES (13)..(13): 2-aminoisobutyric acid
  MOD_RES (15)..(15): Alpha-Me S5-pentenyl-alanine olefin amino acid connected by an all-carbon crosslinker comprising one double bond
  MISC_FEATURE (15)..(19): Crosslink between residues
  MOD_RES (19)..(19): Alpha-Me S5-pentenyl-alanine olefin amino acid connected by an all-carbon crosslinker comprising one double bond
  C-term NH2
IAIAQALRXIGDXFAAYYA

SEQ ID NO: 1278 - protein, 19 aa, Artificial Sequence
  Description of Artificial Sequence: Synthetic peptide
  N-term Ac
  MOD_RES (2)..(2): Alpha-Me S5-pentenyl-alanine olefin amino acid connected by an all-carbon crosslinker comprising one double bond
  MISC_FEATURE (2)..(6): Crosslink between residues
  MOD_RES (6)..(6): Alpha-Me S5-pentenyl-alanine olefin amino acid connected by an all-carbon crosslinker comprising one double bond
  MOD_RES (9)..(9): Norleucine
  MOD_RES (13)..(13): Norleucine
  MOD_RES (15)..(15): Alpha-Me S5-pentenyl-alanine olefin amino acid connected by an all-carbon crosslinker comprising one double bond
  MISC_FEATURE (15)..(19): Crosslink between residues
  MOD_RES (19)..(19): Alpha-Me S5-pentenyl-alanine olefin amino acid connected by an all-carbon crosslinker comprising one double bond
  C-term NH2
IAIAQALRLIGDLFAAYYA

SEQ ID NO: 1279 - protein, 19 aa, Artificial Sequence
  Description of Artificial Sequence: Synthetic peptide
  N-term Ac
  MOD_RES (2)..(2): Alpha-Me S5-pentenyl-alanine olefin amino acid connected by an all-carbon crosslinker comprising one double bond
  MISC_FEATURE (2)..(6): Crosslink between residues
  MOD_RES (6)..(6): Alpha-Me S5-pentenyl-alanine olefin amino acid connected by an all-carbon crosslinker comprising one double bond
  MOD_RES (9)..(9): Norleucine
  MOD_RES (13)..(13): Norleucine
  MOD_RES (15)..(15): Alpha-Me S5-pentenyl-alanine olefin amino acid connected by an all-carbon crosslinker comprising one double bond
  MISC_FEATURE (15)..(19): Crosslink between residues
  MOD_RES (19)..(19): Alpha-Me S5-pentenyl-alanine olefin amino acid connected by an all-carbon crosslinker comprising one double bond
  C-term NH2
IAIAQALRLIGDLFAAYYA

SEQ ID NO: 1280 - protein, 19 aa, Artificial Sequence
  Description of Artificial Sequence: Synthetic peptide
  N-term Ac
  MOD_RES (2)..(2): Alpha-Me S5-pentenyl-alanine olefin amino acid connected by an all-carbon crosslinker comprising one double bond
  MISC_FEATURE (2)..(6): Crosslink between residues
  MOD_RES (6)..(6): Alpha-Me S5-pentenyl-alanine olefin amino acid connected by an all-carbon crosslinker comprising one double bond
  MOD_RES (9)..(9): Norleucine
  MOD_RES (13)..(13): 2-aminoisobutyric acid
  MOD_RES (15)..(15): Alpha-Me S5-pentenyl-alanine olefin amino acid connected by an all-carbon crosslinker comprising one double bond
  MISC_FEATURE (15)..(19): Crosslink between residues
  MOD_RES (19)..(19): Alpha-Me S5-pentenyl-alanine olefin amino acid connected by an all-carbon crosslinker comprising one double bond
  C-term NH2
IAIAQALRLIGDXFAAYYA

SEQ ID NO: 1281 - protein, 19 aa, Artificial Sequence
  Description of Artificial Sequence: Synthetic peptide
  N-term Ac
  MOD_RES (2)..(2): Alpha-Me S5-pentenyl-alanine olefin amino acid connected by an all-carbon crosslinker comprising one double bond
  MISC_FEATURE (2)..(6): Crosslink between residues
  MOD_RES (6)..(6): Alpha-Me S5-pentenyl-alanine olefin amino acid connected by an all-carbon crosslinker comprising one double bond
  MOD_RES (9)..(9): Norleucine
  MOD_RES (13)..(13): 2-aminoisobutyric acid
  MOD_RES (15)..(15): Alpha-Me S5-pentenyl-alanine olefin amino acid connected by an all-carbon crosslinker comprising one double bond
  MISC_FEATURE (15)..(19): Crosslink between residues
  MOD_RES (19)..(19): Alpha-Me S5-pentenyl-alanine olefin amino acid connected by an all-carbon crosslinker comprising one double bond
  C-term NH2
IAIAQALRLIGDXFAAYYA

SEQ ID NO: 1282 - protein, 20 aa, Artificial Sequence
  Description of Artificial Sequence: Synthetic peptide
  N-term Ac
  MOD_RES (5)..(5): Alpha-Me S5-pentenyl-alanine olefin amino acid connected by an all-carbon crosslinker comprising one double bond
  MISC_FEATURE (5)..(9): Crosslink between residues
  MOD_RES (9)..(9): Alpha-Me S5-pentenyl-alanine olefin amino acid connected by an all-carbon crosslinker comprising one double bond
  MOD_RES (13)..(13): Alpha-Me R8-octenyl-alanine olefin amino acid connected by an all-carbon crosslinker comprising one double bond
  MISC_FEATURE (13)..(20): Crosslink between residues
  MOD_RES (20)..(20): Alpha-Me S5-pentenyl-alanine olefin amino acid connected by an all-carbon crosslinker comprising one double bond
  C-term NH2
IWIAAVLRAIGDAFNAYYAA

SEQ ID NO: 1283 - protein, 20 aa, Artificial Sequence
  Description of Artificial Sequence: Synthetic peptide
  N-term Ac
  MOD_RES (5)..(5): Alpha-Me S5-pentenyl-alanine olefin amino acid connected by an all-carbon crosslinker comprising one double bond
  MISC_FEATURE (5)..(9): Crosslink between residues
  MOD_RES (9)..(9): Alpha-Me S5-pentenyl-alanine olefin amino acid connected by an all-carbon crosslinker comprising one double bond
  MOD_RES (13)..(13): Alpha-Me R8-octenyl-alanine olefin amino acid connected by an all-carbon crosslinker comprising one double bond
  MISC_FEATURE (13)..(20): Crosslink between residues
  MOD_RES (20)..(20): Alpha-Me S5-pentenyl-alanine olefin amino acid connected by an all-carbon crosslinker comprising one double bond
  C-term NH2
IWIAALLRAIGDAFNAYYAA

SEQ ID NO: 1284 - protein, 20 aa, Artificial Sequence
  Description of Artificial Sequence: Synthetic peptide
  N-term Ac
  MOD_RES (5)..(5): Alpha-Me S5-pentenyl-alanine olefin amino acid connected by an all-carbon crosslinker comprising one double bond
  MISC_FEATURE (5)..(9): Crosslink between residues
  MOD_RES (9)..(9): Alpha-Me S5-pentenyl-alanine olefin amino acid connected by an all-carbon crosslinker comprising one double bond
  MOD_RES (13)..(13): Alpha-Me R8-octenyl-alanine olefin amino acid connected by an all-carbon crosslinker comprising one double bond
  MISC_FEATURE (13)..(20): Crosslink between residues
  MOD_RES (20)..(20): Alpha-Me S5-pentenyl-alanine olefin amino acid connected by an all-carbon crosslinker comprising one double bond
  C-term NH2
IWIAAFLRAIGDAFNAYYAA

SEQ ID NO: 1285 - protein, 20 aa, Artificial Sequence
  Description of Artificial Sequence: Synthetic peptide
  N-term Ac
  MOD_RES (5)..(5): Alpha-Me S5-pentenyl-alanine olefin amino acid connected by an all-carbon crosslinker comprising one double bond
  MISC_FEATURE (5)..(9): Crosslink between residues
  MOD_RES (9)..(9): Alpha-Me S5-pentenyl-alanine olefin amino acid connected by an all-carbon crosslinker comprising one double bond
  MOD_RES (13)..(13): Alpha-Me R8-octenyl-alanine olefin amino acid connected by an all-carbon crosslinker comprising one double bond
  MISC_FEATURE (13)..(20): Crosslink between residues
  MOD_RES (20)..(20): Alpha-Me S5-pentenyl-alanine olefin amino acid connected by an all-carbon crosslinker comprising one double bond
  C-term NH2
IWIAASLRAIGDAFNAYYAA

SEQ ID NO: 1286 - protein, 20 aa, Artificial Sequence
  Description of Artificial Sequence: Synthetic peptide
  N-term Ac
  MOD_RES (5)..(5): Alpha-Me S5-pentenyl-alanine olefin amino acid connected by an all-carbon crosslinker comprising one double bond
  MISC_FEATURE (5)..(9): Crosslink between residues
  MOD_RES (9)..(9): Alpha-Me S5-pentenyl-alanine olefin amino acid connected by an all-carbon crosslinker comprising one double bond
  MOD_RES (13)..(13): Alpha-Me R8-octenyl-alanine olefin amino acid connected by an all-carbon crosslinker comprising one double bond
  MISC_FEATURE (13)..(20): Crosslink between residues
  MOD_RES (20)..(20): Alpha-Me S5-pentenyl-alanine olefin amino acid connected by an all-carbon crosslinker comprising one double bond
  C-term NH2
IWIAAELRAIGDAFNAYYAA

SEQ ID NO: 1287 - protein, 20 aa, Artificial Sequence
  Description of Artificial Sequence: Synthetic peptide
  N-term Ac
  MOD_RES (5)..(5): Alpha-Me S5-pentenyl-alanine olefin amino acid connected by an all-carbon crosslinker comprising one double bond
  MISC_FEATURE (5)..(9): Crosslink between residues
  MOD_RES (9)..(9): Alpha-Me S5-pentenyl-alanine olefin amino acid connected by an all-carbon crosslinker comprising one double bond
  MOD_RES (13)..(13): Alpha-Me R8-octenyl-alanine olefin amino acid connected by an all-carbon crosslinker comprising one double bond
  MISC_FEATURE (13)..(20): Crosslink between residues
  MOD_RES (20)..(20): Alpha-Me S5-pentenyl-alanine olefin amino acid connected by an all-carbon crosslinker comprising one double bond
  C-term NH2
IWIAAALRAIGDAFNAYYAA

SEQ ID NO: 1288 - protein, 19 aa, Artificial Sequence
  Description of Artificial Sequence: Synthetic peptide
  N-term Ac
  MOD_RES (2)..(2): Alpha-Me S5-pentenyl-alanine olefin amino acid connected by an all-carbon crosslinker comprising one double bond
  MISC_FEATURE (2)..(6): Crosslink between residues
  MOD_RES (6)..(6): Alpha-Me S5-pentenyl-alanine olefin amino acid connected by an all-carbon crosslinker comprising one double bond
  MOD_RES (15)..(15): Alpha-Me S5-pentenyl-alanine olefin amino acid connected by an all-carbon crosslinker comprising one double bond
  MISC_FEATURE (15)..(19): Crosslink between residues
  MOD_RES (19)..(19): Alpha-Me S5-pentenyl-alanine olefin amino acid connected by an all-carbon crosslinker comprising one double bond
  C-term NH2
IAIAAALRRIGDEFAAYYA

SEQ ID NO: 1289 - protein, 19 aa, Artificial Sequence
  Description of Artificial Sequence: Synthetic peptide
  N-term Ac
  MOD_RES (2)..(2): Alpha-Me S5-pentenyl-alanine olefin amino acid connected by an all-carbon crosslinker comprising one double bond
  MISC_FEATURE (2)..(6): Crosslink between residues
  MOD_RES (6)..(6): Alpha-Me S5-pentenyl-alanine olefin amino acid connected by an all-carbon crosslinker comprising one double bond
  MOD_RES (15)..(15): Alpha-Me S5-pentenyl-alanine olefin amino acid connected by an all-carbon crosslinker comprising one double bond
  MISC_FEATURE (15)..(19): Crosslink between residues
  MOD_RES (19)..(19): Alpha-Me S5-pentenyl-alanine olefin amino acid connected by an all-carbon crosslinker comprising one double bond
  C-term NH2
IAIAAALRRIGDEFAAYYA

SEQ ID NO: 1290 - protein, 21 aa, Artificial Sequence
  Description of Artificial Sequence: Synthetic peptide
  N-term Ac
  MOD_RES (2)..(2): Alpha-Me S5-pentenyl-alanine olefin amino acid connected by an all-carbon crosslinker comprising one double bond
  MISC_FEATURE (2)..(6): Crosslink between residues
  MOD_RES (6)..(6): Alpha-Me S5-pentenyl-alanine olefin amino acid connected by an all-carbon crosslinker comprising one double bond
  MOD_RES (15)..(15): Alpha-Me S5-pentenyl-alanine olefin amino acid connected by an all-carbon crosslinker comprising one double bond
  MISC_FEATURE (15)..(19): Crosslink between residues
  MOD_RES (19)..(19): Alpha-Me S5-pentenyl-alanine olefin amino acid connected by an all-carbon crosslinker comprising one double bond
  C-term NH2
IAIALALRRIGDEFAAYYARR

SEQ ID NO: 1291 - protein, 21 aa, Artificial Sequence
  Description of Artificial Sequence: Synthetic peptide
  N-term Ac
  MOD_RES (2)..(2): Alpha-Me S5-pentenyl-alanine olefin amino acid connected by an all-carbon crosslinker comprising one double bond
  MISC_FEATURE (2)..(6): Crosslink between residues
  MOD_RES (6)..(6): Alpha-Me S5-pentenyl-alanine olefin amino acid connected by an all-carbon crosslinker comprising one double bond
  MOD_RES (9)..(9): 2-aminoisobutyric acid
  MOD_RES (15)..(15): Alpha-Me S5-pentenyl-alanine olefin amino acid connected by an all-carbon crosslinker comprising one double bond
  MISC_FEATURE (15)..(19): Crosslink between residues
  MOD_RES (19)..(19): Alpha-Me S5-pentenyl-alanine olefin amino acid connected by an all-carbon crosslinker comprising one double bond
  C-term NH2
IAIAQALRXIGDAFAAYYARR

SEQ ID NO: 1292 - protein, 21 aa, Artificial Sequence
  Description of Artificial Sequence: Synthetic peptide
  N-term Ac
  MOD_RES (2)..(2): Alpha-Me S5-pentenyl-alanine olefin amino acid connected by an all-carbon crosslinker comprising one double bond
  MISC_FEATURE (2)..(6): Crosslink between residues
  MOD_RES (6)..(6): Alpha-Me S5-pentenyl-alanine olefin amino acid connected by an all-carbon crosslinker comprising one double bond
  MOD_RES (9)..(9): 2-aminoisobutyric acid
  MOD_RES (15)..(15): Alpha-Me S5-pentenyl-alanine olefin amino acid connected by an all-carbon crosslinker comprising one double bond
  MISC_FEATURE (15)..(19): Crosslink between residues
  MOD_RES (19)..(19): Alpha-Me S5-pentenyl-alanine olefin amino acid connected by an all-carbon crosslinker comprising one double bond
  C-term NH2
IAIALALRXIGDAFAAYYARR

SEQ ID NO: 1293 - protein, 20 aa, Artificial Sequence
  Description of Artificial Sequence: Synthetic peptide
  N-term Ac
  MOD_RES (2)..(2): Alpha-Me S5-pentenyl-alanine olefin amino acid connected by an all-carbon crosslinker comprising one double bond
  MISC_FEATURE (2)..(6): Crosslink between residues
  MOD_RES (6)..(6): Alpha-Me S5-pentenyl-alanine olefin amino acid connected by an all-carbon crosslinker comprising one double bond
  MOD_RES (15)..(15): Alpha-Me S5-pentenyl-alanine olefin amino acid connected by an all-carbon crosslinker comprising one double bond
  MISC_FEATURE (15)..(19): Crosslink between residues
  MOD_RES (19)..(19): Alpha-Me S5-pentenyl-alanine olefin amino acid connected by an all-carbon crosslinker comprising one double bond
  C-term NH2
IAIALALRRIGDEFAAYYAR

SEQ ID NO: 1294 - protein, 20 aa, Artificial Sequence
  Description of Artificial Sequence: Synthetic peptide
  N-term Ac
  MOD_RES (2)..(2): Alpha-Me S5-pentenyl-alanine olefin amino acid connected by an all-carbon crosslinker comprising one double bond
  MISC_FEATURE (2)..(6): Crosslink between residues
  MOD_RES (6)..(6): Alpha-Me S5-pentenyl-alanine olefin amino acid connected by an all-carbon crosslinker comprising one double bond
  MOD_RES (9)..(9): 2-aminoisobutyric acid
  MOD_RES (15)..(15): Alpha-Me S5-pentenyl-alanine olefin amino acid connected by an all-carbon crosslinker comprising one double bond
  MISC_FEATURE (15)..(19): Crosslink between residues
  MOD_RES (19)..(19): Alpha-Me S5-pentenyl-alanine olefin amino acid connected by an all-carbon crosslinker comprising one double bond
  C-term NH2
IAIAQALRXIGDAFAAYYAR

SEQ ID NO: 1295 - protein, 20 aa, Artificial Sequence
  Description of Artificial Sequence: Synthetic peptide
  N-term Ac
  MOD_RES (2)..(2): Alpha-Me S5-pentenyl-alanine olefin amino acid connected by an all-carbon crosslinker comprising one double bond
  MISC_FEATURE (2)..(6): Crosslink between residues
  MOD_RES (6)..(6): Alpha-Me S5-pentenyl-alanine olefin amino acid connected by an all-carbon crosslinker comprising one double bond
  MOD_RES (9)..(9): 2-aminoisobutyric acid
  MOD_RES (15)..(15): Alpha-Me S5-pentenyl-alanine olefin amino acid connected by an all-carbon crosslinker comprising one double bond
  MISC_FEATURE (15)..(19): Crosslink between residues
  MOD_RES (19)..(19): Alpha-Me S5-pentenyl-alanine olefin amino acid connected by an all-carbon crosslinker comprising one double bond
  C-term NH2
IAIALALRXIGDAFAAYYAR

SEQ ID NO: 1296 - protein, 21 aa, Artificial Sequence
  Description of Artificial Sequence: Synthetic peptide
  N-term Ac
  MOD_RES (2)..(2): Alpha-Me S5-pentenyl-alanine olefin amino acid connected by an all-carbon crosslinker comprising one double bond
  MISC_FEATURE (2)..(6): Crosslink between residues
  MOD_RES (6)..(6): Alpha-Me S5-pentenyl-alanine olefin amino acid connected by an all-carbon crosslinker comprising one double bond
  MOD_RES (9)..(9): Alpha-Me R8-octenyl-alanine olefin amino acid connected by an all-carbon crosslinker comprising one double bond
  MISC_FEATURE (9)..(16): Crosslink between residues
  MOD_RES (16)..(16): Alpha-Me S5-pentenyl-alanine olefin amino acid connected by an all-carbon crosslinker comprising one double bond
  C-term NH2
IAIAYALRAIGDEFNAYYARR

SEQ ID NO: 1297 - protein, 21 aa, Artificial Sequence
  Description of Artificial Sequence: Synthetic peptide
  N-term Ac
  MOD_RES (2)..(2): Alpha-Me S5-pentenyl-alanine olefin amino acid connected by an all-carbon crosslinker comprising one double bond
  MISC_FEATURE (2)..(6): Crosslink between residues
  MOD_RES (6)..(6): Alpha-Me S5-pentenyl-alanine olefin amino acid connected by an all-carbon crosslinker comprising one double bond
  MOD_RES (9)..(9): Alpha-Me R8-octenyl-alanine olefin amino acid connected by an all-carbon crosslinker comprising one double bond
  MISC_FEATURE (9)..(16): Crosslink between residues
  MOD_RES (16)..(16): Alpha-Me S5-pentenyl-alanine olefin amino acid connected by an all-carbon crosslinker comprising one double bond
  C-term NH2
IAIALALRAIGDEFNAYYARR

SEQ ID NO: 1298 - protein, 21 aa, Artificial Sequence
  Description of Artificial Sequence: Synthetic peptide
  N-term Ac
  MOD_RES (2)..(2): Alpha-Me S5-pentenyl-alanine olefin amino acid connected by an all-carbon crosslinker comprising one double bond
  MISC_FEATURE (2)..(6): Crosslink between residues
  MOD_RES (6)..(6): Alpha-Me S5-pentenyl-alanine olefin amino acid connected by an all-carbon crosslinker comprising one double bond
  MOD_RES (9)..(9): Alpha-Me R8-octenyl-alanine olefin amino acid connected by an all-carbon crosslinker comprising one double bond
  MISC_FEATURE (9)..(16): Crosslink between residues
  MOD_RES (16)..(16): Alpha-Me S5-pentenyl-alanine olefin amino acid connected by an all-carbon crosslinker comprising one double bond
  C-term NH2
IAIAFALRAIGDEFNAYYARR

SEQ ID NO: 1299 - protein, 20 aa, Artificial Sequence
  Description of Artificial Sequence: Synthetic peptide
  N-term Ac
  MOD_RES (2)..(2): Alpha-Me S5-pentenyl-alanine olefin amino acid connected by an all-carbon crosslinker comprising one double bond
  MISC_FEATURE (2)..(6): Crosslink between residues
  MOD_RES (6)..(6): Alpha-Me S5-pentenyl-alanine olefin amino acid connected by an all-carbon crosslinker comprising one double bond
  MOD_RES (9)..(9): Alpha-Me R8-octenyl-alanine olefin amino acid connected by an all-carbon crosslinker comprising one double bond
  MISC_FEATURE (9)..(16): Crosslink between residues
  MOD_RES (16)..(16): Alpha-Me S5-pentenyl-alanine olefin amino acid connected by an all-carbon crosslinker comprising one double bond
  C-term NH2
IAIAQALRAIGDEFNAYYAR

SEQ ID NO: 1300 - protein, 20 aa, Artificial Sequence
  Description of Artificial Sequence: Synthetic peptide
  N-term Ac
  MOD_RES (2)..(2): Alpha-Me S5-pentenyl-alanine olefin amino acid connected by an all-carbon crosslinker comprising one double bond
  MISC_FEATURE (2)..(6): Crosslink between residues
  MOD_RES (6)..(6): Alpha-Me S5-pentenyl-alanine olefin amino acid connected by an all-carbon crosslinker comprising one double bond
  MOD_RES (9)..(9): Alpha-Me R8-octenyl-alanine olefin amino acid connected by an all-carbon crosslinker comprising one double bond
  MISC_FEATURE (9)..(16): Crosslink between residues
  MOD_RES (16)..(16): Alpha-Me S5-pentenyl-alanine olefin amino acid connected by an all-carbon crosslinker comprising one double bond
  C-term NH2
IAIAYALRAIGDEFNAYYAR

SEQ ID NO: 1301 - protein, 20 aa, Artificial Sequence
  Description of Artificial Sequence: Synthetic peptide
  N-term Ac
  MOD_RES (2)..(2): Alpha-Me S5-pentenyl-alanine olefin amino acid connected by an all-carbon crosslinker comprising one double bond
  MISC_FEATURE (2)..(6): Crosslink between residues
  MOD_RES (6)..(6): Alpha-Me S5-pentenyl-alanine olefin amino acid connected by an all-carbon crosslinker comprising one double bond
  MOD_RES (9)..(9): Alpha-Me R8-octenyl-alanine olefin amino acid connected by an all-carbon crosslinker comprising one double bond
  MISC_FEATURE (9)..(16): Crosslink between residues
  MOD_RES (16)..(16): Alpha-Me S5-pentenyl-alanine olefin amino acid connected by an all-carbon crosslinker comprising one double bond
  C-term NH2
IAIALALRAIGDEFNAYYAR

SEQ ID NO: 1302 - protein, 20 aa, Artificial Sequence
  Description of Artificial Sequence: Synthetic peptide
  N-term Ac
  MOD_RES (2)..(2): Alpha-Me S5-pentenyl-alanine olefin amino acid connected by an all-carbon crosslinker comprising one double bond
  MISC_FEATURE (2)..(6): Crosslink between residues
  MOD_RES (6)..(6): Alpha-Me S5-pentenyl-alanine olefin amino acid connected by an all-carbon crosslinker comprising one double bond
  MOD_RES (9)..(9): Alpha-Me R8-octenyl-alanine olefin amino acid connected by an all-carbon crosslinker comprising one double bond
  MISC_FEATURE (9)..(16): Crosslink between residues
  MOD_RES (16)..(16): Alpha-Me S5-pentenyl-alanine olefin amino acid connected by an all-carbon crosslinker comprising one double bond
  C-term NH2
IAIAFALRAIGDEFNAYYAR

SEQ ID NO: 1303 - protein, 21 aa, Artificial Sequence
  Description of Artificial Sequence: Synthetic peptide
  N-term Ac
  MOD_RES (5)..(5): Alpha-Me S5-pentenyl-alanine olefin amino acid connected by an all-carbon crosslinker comprising one double bond
  MISC_FEATURE (5)..(9): Crosslink between residues
  MOD_RES (9)..(9): Alpha-Me S5-pentenyl-alanine olefin amino acid connected by an all-carbon crosslinker comprising one double bond
  MOD_RES (13)..(13): Alpha-Me R8-octenyl-alanine olefin amino acid connected by an all-carbon crosslinker comprising one double bond
  MISC_FEATURE (13)..(20): Crosslink between residues
  MOD_RES (20)..(20): Alpha-Me S5-pentenyl-alanine olefin amino acid connected by an all-carbon crosslinker comprising one double bond
  C-term NH2
IWIAAALRAIGDAFNAYYAAR

SEQ ID NO: 1304 - protein, 21 aa, Artificial Sequence
  Description of Artificial Sequence: Synthetic peptide
  N-term Ac
  MOD_RES (9)..(9): Alpha-Me R8-octenyl-alanine olefin amino acid connected by an all-carbon crosslinker comprising one double bond
  MISC_FEATURE (9)..(16): Crosslink between residues
  MOD_RES (16)..(16): Alpha-Me S5-pentenyl-alanine olefin amino acid connected by an all-carbon crosslinker comprising one double bond
  C-term NH2
IWIALALRAIGDEFNAYYARR

SEQ ID NO: 1305 - protein, 21 aa, Artificial Sequence
  Description of Artificial Sequence: Synthetic peptide
  N-term Ac
  MOD_RES (9)..(9): Alpha-Me R8-octenyl-alanine olefin amino acid connected by an all-carbon crosslinker comprising one double bond
  MISC_FEATURE (9)..(16): Crosslink between residues
  MOD_RES (16)..(16): Alpha-Me S5-pentenyl-alanine olefin amino acid connected by an all-carbon crosslinker comprising one double bond
  C-term NH2
IWIAYALRAIGDEFNAYYARR

SEQ ID NO: 1306 - protein, 20 aa, Artificial Sequence
  Description of Artificial Sequence: Synthetic peptide
  N-term Ac
  MOD_RES (9)..(9): Alpha-Me R8-octenyl-alanine olefin amino acid connected by an all-carbon crosslinker comprising one double bond
  MISC_FEATURE (9)..(16): Crosslink between residues
  MOD_RES (16)..(16): Alpha-Me S5-pentenyl-alanine olefin amino acid connected by an all-carbon crosslinker comprising one double bond
  C-term NH2
IWIAQALRAIGDEFNAYYAR

SEQ ID NO: 1307 - protein, 20 aa, Artificial Sequence
  Description of Artificial Sequence: Synthetic peptide
  N-term Ac
  MOD_RES (9)..(9): Alpha-Me R8-octenyl-alanine olefin amino acid connected by an all-carbon crosslinker comprising one double bond
  MISC_FEATURE (9)..(16): Crosslink between residues
  MOD_RES (16)..(16): Alpha-Me S5-pentenyl-alanine olefin amino acid connected by an all-carbon crosslinker comprising one double bond
  C-term NH2
IWIALALRAIGDEFNAYYAR

SEQ ID NO: 1308 - protein, 20 aa, Artificial Sequence
  Description of Artificial Sequence: Synthetic peptide
  N-term Ac
  MOD_RES (9)..(9): Alpha-Me R8-octenyl-alanine olefin amino acid connected by an all-carbon crosslinker comprising one double bond
  MISC_FEATURE (9)..(16): Crosslink between residues
  MOD_RES (16)..(16): Alpha-Me S5-pentenyl-alanine olefin amino acid connected by an all-carbon crosslinker comprising one double bond
  C-term NH2
IWIAYALRAIGDEFNAYYAR

SEQ ID NO: 1309 - protein, 21 aa, Artificial Sequence
  Description of Artificial Sequence: Synthetic peptide
  N-term Ac
  MOD_RES (9)..(9): Alpha-Me S5-pentenyl-alanine olefin amino acid connected by an all-carbon crosslinker comprising one double bond
  MISC_FEATURE (9)..(13): Crosslink between residues
  MOD_RES (13)..(13): Alpha-Me S5-pentenyl-alanine olefin amino acid connected by an all-carbon crosslinker comprising one double bond
  C-term NH2
IWIALALRAIGDAFNAYYARR

SEQ ID NO: 1310 - protein, 21 aa, Artificial Sequence
  Description of Artificial Sequence: Synthetic peptide
  N-term Ac
  MOD_RES (9)..(9): Alpha-Me S5-pentenyl-alanine olefin amino acid connected by an all-carbon crosslinker comprising one double bond
  MISC_FEATURE (9)..(13): Crosslink between residues
  MOD_RES (13)..(13): Alpha-Me S5-pentenyl-alanine olefin amino acid connected by an all-carbon crosslinker comprising one double bond
  C-term NH2
IWIAYALRAIGDAFNAYYARR

SEQ ID NO: 1311 - protein, 20 aa, Artificial Sequence
  Description of Artificial Sequence: Synthetic peptide
  N-term Ac
  MOD_RES (9)..(9): Alpha-Me S5-pentenyl-alanine olefin amino acid connected by an all-carbon crosslinker comprising one double bond
  MISC_FEATURE (9)..(13): Crosslink between residues
  MOD_RES (13)..(13): Alpha-Me S5-pentenyl-alanine olefin amino acid connected by an all-carbon crosslinker comprising one double bond
  C-term NH2
IWIALALRAIGDAFNAYYAR

SEQ ID NO: 1312 - protein, 20 aa, Artificial Sequence
  Description of Artificial Sequence: Synthetic peptide
  N-term Ac
  MOD_RES (9)..(9): Alpha-Me S5-pentenyl-alanine olefin amino acid connected by an all-carbon crosslinker comprising one double bond
  MISC_FEATURE (9)..(13): Crosslink between residues
  MOD_RES (13)..(13): Alpha-Me S5-pentenyl-alanine olefin amino acid connected by an all-carbon crosslinker comprising one double bond
  C-term NH2
IWIAYALRAIGDAFNAYYAR

SEQ ID NO: 1313 - protein, 20 aa, Artificial Sequence
  Description of Artificial Sequence: Synthetic peptide
  N-term Ac
  MOD_RES (9)..(9): Alpha-Me S5-pentenyl-alanine olefin amino acid connected by an all-carbon crosslinker comprising one double bond
  MISC_FEATURE (9)..(13): Crosslink between residues
  MOD_RES (13)..(13): Alpha-Me S5-pentenyl-alanine olefin amino acid connected by an all-carbon crosslinker comprising one double bond
  C-term NH2
IWIALALRAIGDAFNAYYAH

SEQ ID NO: 1314 - protein, 19 aa, Artificial Sequence
  Description of Artificial Sequence: Synthetic peptide
  N-term Ac
  MOD_RES (9)..(9): reduced alpha-Me R8-octenyl-alanine olefin amino acid connected by an all-carbon crosslinker comprising one double bond
  MISC_FEATURE (9)..(16): Crosslink between residues
  MOD_RES (16)..(16): Modified alanine amino acid connected by a reduced olefin crosslinker
  C-term NH2
IWIAQALRAIGDAFNAYYA

SEQ ID NO: 1315 - protein, 21 aa, Artificial Sequence
  Description of Artificial Sequence: Synthetic peptide
  N-term Ac
  MOD_RES (2)..(2): Alpha-Me S5-pentenyl-alanine olefin amino acid connected by an all-carbon crosslinker comprising one double bond
  MISC_FEATURE (2)..(6): Crosslink between residues
  MOD_RES (6)..(6): Alpha-Me S5-pentenyl-alanine olefin amino acid connected by an all-carbon crosslinker comprising one double bond
  MOD_RES (15)..(15): Alpha-Me S5-pentenyl-alanine olefin amino acid connected by an all-carbon crosslinker comprising one double bond
  MISC_FEATURE (15)..(19): Crosslink between residues
  MOD_RES (19)..(19): Alpha-Me S5-pentenyl-alanine olefin amino acid connected by an all-carbon crosslinker comprising one double bond
  C-term NH2
IAIALALRRIGDEFAAYYARR

SEQ ID NO: 1316 - protein, 20 aa, Artificial Sequence
  Description of Artificial Sequence: Synthetic peptide
  N-term Ac
  MOD_RES (2)..(2): Alpha-Me S5-pentenyl-alanine olefin amino acid connected by an all-carbon crosslinker comprising one double bond
  MISC_FEATURE (2)..(6): Crosslink between residues
  MOD_RES (6)..(6): Alpha-Me S5-pentenyl-alanine olefin amino acid connected by an all-carbon crosslinker comprising one double bond
  MOD_RES (15)..(15): Alpha-Me S5-pentenyl-alanine olefin amino acid connected by an all-carbon crosslinker comprising one double bond
  MISC_FEATURE (15)..(19): Crosslink between residues
  MOD_RES (19)..(19): Alpha-Me S5-pentenyl-alanine olefin amino acid connected by an all-carbon crosslinker comprising one double bond
  C-term NH2
IAIALALRRIGDEFAAYYAR

SEQ ID NO: 1317 - protein, 20 aa, Artificial Sequence
  Description of Artificial Sequence: Synthetic peptide
  N-term Ac
  MOD_RES (2)..(2): Alpha-Me S5-pentenyl-alanine olefin amino acid connected by an all-carbon crosslinker comprising one double bond
  MISC_FEATURE (2)..(6): Crosslink between residues
  MOD_RES (6)..(6): Alpha-Me S5-pentenyl-alanine olefin amino acid connected by an all-carbon crosslinker comprising one double bond
  MOD_RES (9)..(9): 2-aminoisobutyric acid
  MOD_RES (15)..(15): Alpha-Me S5-pentenyl-alanine olefin amino acid connected by an all-carbon crosslinker comprising one double bond
  MISC_FEATURE (15)..(19): Crosslink between residues
  MOD_RES (19)..(19): Alpha-Me S5-pentenyl-alanine olefin amino acid connected by an all-carbon crosslinker comprising one double bond
  C-term NH2
IAIAQALRXIGDAFAAYYAR

SEQ ID NO: 1318 - protein, 20 aa, Artificial Sequence
  Description of Artificial Sequence: Synthetic peptide
  N-term Ac
  MOD_RES (2)..(2): Alpha-Me S5-pentenyl-alanine olefin amino acid connected by an all-carbon crosslinker comprising one double bond
  MISC_FEATURE (2)..(6): Crosslink between residues
  MOD_RES (6)..(6): Alpha-Me S5-pentenyl-alanine olefin amino acid connected by an all-carbon crosslinker comprising one double bond
  MOD_RES (9)..(9): 2-aminoisobutyric acid
  MOD_RES (15)..(15): Alpha-Me S5-pentenyl-alanine olefin amino acid connected by an all-carbon crosslinker comprising one double bond
  MISC_FEATURE (15)..(19): Crosslink between residues
  MOD_RES (19)..(19): Alpha-Me S5-pentenyl-alanine olefin amino acid connected by an all-carbon crosslinker comprising one double bond
  C-term NH2
IAIALALRXIGDAFAAYYAR

SEQ ID NO: 1319 - protein, 21 aa, Artificial Sequence
  Description of Artificial Sequence: Synthetic peptide
  N-term Ac
  MOD_RES (2)..(2): Alpha-Me S5-pentenyl-alanine olefin amino acid connected by an all-carbon crosslinker comprising one double bond
  MISC_FEATURE (2)..(6): Crosslink between residues
  MOD_RES (6)..(6): Alpha-Me S5-pentenyl-alanine olefin amino acid connected by an all-carbon crosslinker comprising one double bond
  MOD_RES (9)..(9): Alpha-Me R8-octenyl-alanine olefin amino acid connected by an all-carbon crosslinker comprising one double bond
  MISC_FEATURE (9)..(16): Crosslink between residues
  MOD_RES (16)..(16): Alpha-Me S5-pentenyl-alanine olefin amino acid connected by an all-carbon crosslinker comprising one double bond
  C-term NH2
IAIAYALRAIGDEFNAYYARR

SEQ ID NO: 1320 - protein, 21 aa, Artificial Sequence
  Description of Artificial Sequence: Synthetic peptide
  N-term Ac
  MOD_RES (2)..(2): Alpha-Me S5-pentenyl-alanine olefin amino acid connected by an all-carbon crosslinker comprising one double bond
  MISC_FEATURE (2)..(6): Crosslink between residues
  MOD_RES (6)..(6): Alpha-Me S5-pentenyl-alanine olefin amino acid connected by an all-carbon crosslinker comprising one double bond
  MOD_RES (9)..(9): Alpha-Me R8-octenyl-alanine olefin amino acid connected by an all-carbon crosslinker comprising one double bond
  MISC_FEATURE (9)..(16): Crosslink between residues
  MOD_RES (16)..(16): Alpha-Me S5-pentenyl-alanine olefin amino acid connected by an all-carbon crosslinker comprising one double bond
  C-term NH2
IAIALALRAIGDEFNAYYARR

SEQ ID NO: 1321 - protein, 21 aa, Artificial Sequence
  Description of Artificial Sequence: Synthetic peptide
  N-term Ac
  MOD_RES (5)..(5): Alpha-Me S5-pentenyl-alanine olefin amino acid connected by an all-carbon crosslinker comprising one double bond
  MISC_FEATURE (5)..(9): Crosslink between residues
  MOD_RES (9)..(9): Alpha-Me S5-pentenyl-alanine olefin amino acid connected by an all-carbon crosslinker comprising one double bond
  MOD_RES (13)..(13): Alpha-Me R8-octenyl-alanine olefin amino acid connected by an all-carbon crosslinker comprising one double bond
  MISC_FEATURE (13)..(20): Crosslink between residues
  MOD_RES (20)..(20): Alpha-Me S5-pentenyl-alanine olefin amino acid connected by an all-carbon crosslinker comprising one double bond
  C-term NH2
IWIAAALRAIGDAFNAYYAAR

SEQ ID NO: 1322 - protein, 20 aa, Artificial Sequence
  Description of Artificial Sequence: Synthetic peptide
  N-term Ac
  MOD_RES (2)..(2): Alpha-Me S5-pentenyl-alanine olefin amino acid connected by an all-carbon crosslinker comprising one double bond
  MISC_FEATURE (2)..(6): Crosslink between residues
  MOD_RES (6)..(6): Alpha-Me S5-pentenyl-alanine olefin amino acid connected by an all-carbon crosslinker comprising one double bond
  MOD_RES (9)..(9): Alpha-Me R8-octenyl-alanine olefin amino acid connected by an all-carbon crosslinker comprising one double bond
  MISC_FEATURE (9)..(16): Crosslink between residues
  MOD_RES (16)..(16): Alpha-Me S5-pentenyl-alanine olefin amino acid connected by an all-carbon crosslinker comprising one double bond
  C-term NH2
IAIAYALRAIGDEFNAYYAR

SEQ ID NO: 1323 - protein, 20 aa, Artificial Sequence
  Description of Artificial Sequence: Synthetic peptide
  N-term Ac
  MOD_RES (2)..(2): Alpha-Me S5-pentenyl-alanine olefin amino acid connected by an all-carbon crosslinker comprising one double bond
  MISC_FEATURE (2)..(6): Crosslink between residues
  MOD_RES (6)..(6): Alpha-Me S5-pentenyl-alanine olefin amino acid connected by an all-carbon crosslinker comprising one double bond
  MOD_RES (9)..(9): Alpha-Me R8-octenyl-alanine olefin amino acid connected by an all-carbon crosslinker comprising one double bond
  MISC_FEATURE (9)..(16): Crosslink between residues
  MOD_RES (16)..(16): Alpha-Me S5-pentenyl-alanine olefin amino acid connected by an all-carbon crosslinker comprising one double bond
  C-term NH2
IAIALALRAIGDEFNAYYAR

SEQ ID NO: 1324 - protein, 20 aa, Artificial Sequence
  Description of Artificial Sequence: Synthetic peptide
  N-term Ac
  MOD_RES (2)..(2): Alpha-Me S5-pentenyl-alanine olefin amino acid connected by an all-carbon crosslinker comprising one double bond
  MISC_FEATURE (2)..(6): Crosslink between residues
  MOD_RES (6)..(6): Alpha-Me S5-pentenyl-alanine olefin amino acid connected by an all-carbon crosslinker comprising one double bond
  MOD_RES (9)..(9): Alpha-Me R8-octenyl-alanine olefin amino acid connected by an all-carbon crosslinker comprising one double bond
  MISC_FEATURE (9)..(16): Crosslink between residues
  MOD_RES (16)..(16): Alpha-Me S5-pentenyl-alanine olefin amino acid connected by an all-carbon crosslinker comprising one double bond
  C-term NH2
IAIAFALRAIGDEFNAYYAR

SEQ ID NO: 1325 - protein, 21 aa, Artificial Sequence
  Description of Artificial Sequence: Synthetic peptide
  N-term Ac
  MOD_RES (2)..(2): Alpha-Me S5-pentenyl-alanine olefin amino acid connected by an all-carbon crosslinker comprising one double bond
  MISC_FEATURE (2)..(6): Crosslink between residues
  MOD_RES (6)..(6): Alpha-Me S5-pentenyl-alanine olefin amino acid connected by an all-carbon crosslinker comprising one double bond
  MOD_RES (9)..(9): Alpha-Me R8-octenyl-alanine olefin amino acid connected by an all-carbon crosslinker comprising one double bond
  MISC_FEATURE (9)..(16): Crosslink between residues
  MOD_RES (16)..(16): Alpha-Me S5-pentenyl-alanine olefin amino acid connected by an all-carbon crosslinker comprising one double bond
  C-term NH2
IAIAQALRAIGDAFNAYYARR

SEQ ID NO: 1326 - protein, 21 aa, Artificial Sequence
  Description of Artificial Sequence: Synthetic peptide
  N-term Ac
  MOD_RES (2)..(2): Alpha-Me S5-pentenyl-alanine olefin amino acid connected by an all-carbon crosslinker comprising one double bond
  MISC_FEATURE (2)..(6): Crosslink between residues
  MOD_RES (6)..(6): Alpha-Me S5-pentenyl-alanine olefin amino acid connected by an all-carbon crosslinker comprising one double bond
  MOD_RES (9)..(9): Alpha-Me R8-octenyl-alanine olefin amino acid connected by an all-carbon crosslinker comprising one double bond
  MISC_FEATURE (9)..(16): Crosslink between residues
  MOD_RES (16)..(16): Alpha-Me S5-pentenyl-alanine olefin amino acid connected by an all-carbon crosslinker comprising one double bond
  C-term NH2
IAIAYALRAIGDAFNAYYARR

SEQ ID NO: 1327 - protein, 21 aa, Artificial Sequence
  Description of Artificial Sequence: Synthetic peptide
  N-term Ac
  MOD_RES (2)..(2): Alpha-Me S5-pentenyl-alanine olefin amino acid connected by an all-carbon crosslinker comprising one double bond
  MISC_FEATURE (2)..(6): Crosslink between residues
  MOD_RES (6)..(6): Alpha-Me S5-pentenyl-alanine olefin amino acid connected by an all-carbon crosslinker comprising one double bond
  MOD_RES (9)..(9): Alpha-Me R8-octenyl-alanine olefin amino acid connected by an all-carbon crosslinker comprising one double bond
  MISC_FEATURE (9)..(16): Crosslink between residues
  MOD_RES (16)..(16): Alpha-Me S5-pentenyl-alanine olefin amino acid connected by an all-carbon crosslinker comprising one double bond
  C-term NH2
IAIALALRAIGDAFNAYYARR

SEQ ID NO: 1328 - protein, 21 aa, Artificial Sequence
  Description of Artificial Sequence: Synthetic peptide
  N-term Ac
  MOD_RES (2)..(2): Alpha-Me S5-pentenyl-alanine olefin amino acid connected by an all-carbon crosslinker comprising one double bond
  MISC_FEATURE (2)..(6): Crosslink between residues
  MOD_RES (6)..(6): Alpha-Me S5-pentenyl-alanine olefin amino acid connected by an all-carbon crosslinker comprising one double bond
  MOD_RES (9)..(9): Alpha-Me R8-octenyl-alanine olefin amino acid connected by an all-carbon crosslinker comprising one double bond
  MISC_FEATURE (9)..(16): Crosslink between residues
  MOD_RES (16)..(16): Alpha-Me S5-pentenyl-alanine olefin amino acid connected by an all-carbon crosslinker comprising one double bond
  C-term NH2
IAIAFALRAIGDAFNAYYARR

SEQ ID NO: 1329 - protein, 20 aa, Artificial Sequence
  Description of Artificial Sequence: Synthetic peptide
  N-term Ac
  MOD_RES (2)..(2): Alpha-Me S5-pentenyl-alanine olefin amino acid connected by an all-carbon crosslinker comprising one double bond
  MISC_FEATURE (2)..(6): Crosslink between residues
  MOD_RES (6)..(6): Alpha-Me S5-pentenyl-alanine olefin amino acid connected by an all-carbon crosslinker comprising one double bond
  MOD_RES (9)..(9): Alpha-Me R8-octenyl-alanine olefin amino acid connected by an all-carbon crosslinker comprising one double bond
  MISC_FEATURE (9)..(16): Crosslink between residues
  MOD_RES (16)..(16): Alpha-Me S5-pentenyl-alanine olefin amino acid connected by an all-carbon crosslinker comprising one double bond
  C-term NH2
IAIAQALRAIGDAFNAYYAR

SEQ ID NO: 1330 - protein, 20 aa, Artificial Sequence
  Description of Artificial Sequence: Synthetic peptide
  N-term Ac
  MOD_RES (2)..(2): Alpha-Me S5-pentenyl-alanine olefin amino acid connected by an all-carbon crosslinker comprising one double bond
  MISC_FEATURE (2)..(6): Crosslink between residues
  MOD_RES (6)..(6): Alpha-Me S5-pentenyl-alanine olefin amino acid connected by an all-carbon crosslinker comprising one double bond
  MOD_RES (9)..(9): Alpha-Me R8-octenyl-alanine olefin amino acid connected by an all-carbon crosslinker comprising one double bond
  MISC_FEATURE (9)..(16): Crosslink between residues
  MOD_RES (16)..(16): Alpha-Me S5-pentenyl-alanine olefin amino acid connected by an all-carbon crosslinker comprising one double bond
  C-term NH2
IAIAYALRAIGDAFNAYYAR

SEQ ID NO: 1331 - protein, 20 aa, Artificial Sequence
  Description of Artificial Sequence: Synthetic peptide
  N-term Ac
  MOD_RES (2)..(2): Alpha-Me S5-pentenyl-alanine olefin amino acid connected by an all-carbon crosslinker comprising one double bond
  MISC_FEATURE (2)..(6): Crosslink between residues
  MOD_RES (6)..(6): Alpha-Me S5-pentenyl-alanine olefin amino acid connected by an all-carbon crosslinker comprising one double bond
  MOD_RES (9)..(9): Alpha-Me R8-octenyl-alanine olefin amino acid connected by an all-carbon crosslinker comprising one double bond
  MISC_FEATURE (9)..(16): Crosslink between residues
  MOD_RES (16)..(16): Alpha-Me S5-pentenyl-alanine olefin amino acid connected by an all-carbon crosslinker comprising one double bond
  C-term NH2
IAIALALRAIGDAFNAYYAR

SEQ ID NO: 1332 - protein, 20 aa, Artificial Sequence
  Description of Artificial Sequence: Synthetic peptide
  N-term Ac
  MOD_RES (2)..(2): Alpha-Me S5-pentenyl-alanine olefin amino acid connected by an all-carbon crosslinker comprising one double bond
  MISC_FEATURE (2)..(6): Crosslink between residues
  MOD_RES (6)..(6): Alpha-Me S5-pentenyl-alanine olefin amino acid connected by an all-carbon crosslinker comprising one double bond
  MOD_RES (9)..(9): Alpha-Me R8-octenyl-alanine olefin amino acid connected by an all-carbon crosslinker comprising one double bond
  MISC_FEATURE (9)..(16): Crosslink between residues
  MOD_RES (16)..(16): Alpha-Me S5-pentenyl-alanine olefin amino acid connected by an all-carbon crosslinker comprising one double bond
  C-term NH2
IAIAFALRAIGDAFNAYYAR

SEQ ID NO: 1333 - protein, 19 aa, Artificial Sequence
  Description of Artificial Sequence: Synthetic peptide
  N-term Ac
  MOD_RES (9)..(9): Alpha-Me R8-octenyl-alanine olefin amino acid connected by an all-carbon crosslinker comprising one double bond
  MISC_FEATURE (9)..(16): Crosslink between residues
  MOD_RES (16)..(16): Alpha-Me S5-pentenyl-alanine olefin amino acid connected by an all-carbon crosslinker comprising one double bond
  C-term NH2
IWIAQALRAIGDEFNAYYA

SEQ ID NO: 1334 - protein, 19 aa, Artificial Sequence
  Description of Artificial Sequence: Synthetic peptide
  N-term Ac
  MOD_RES (9)..(9): Alpha-Me R8-octenyl-alanine olefin amino acid connected by an all-carbon crosslinker comprising one double bond
  MISC_FEATURE (9)..(16): Crosslink between residues
  MOD_RES (16)..(16): Alpha-Me S5-pentenyl-alanine olefin amino acid connected by an all-carbon crosslinker comprising one double bond
  C-term NH2
IWIAQALRAIGDQFNAYYA

SEQ ID NO: 1335 - protein, 19 aa, Artificial Sequence
  Description of Artificial Sequence: Synthetic peptide
  N-term Ac
  MOD_RES (9)..(9): Alpha-Me R8-octenyl-alanine olefin amino acid connected by an all-carbon crosslinker comprising one double bond
  MISC_FEATURE (9)..(16): Crosslink between residues
  MOD_RES (16)..(16): Alpha-Me S5-pentenyl-alanine olefin amino acid connected by an all-carbon crosslinker comprising one double bond
  C-term NH2
IWIAAALRAIGDEFNAYYA

SEQ ID NO: 1336 - protein, 19 aa, Artificial Sequence
  Description of Artificial Sequence: Synthetic peptide
  N-term Ac
  MOD_RES (9)..(9): Alpha-Me R8-octenyl-alanine olefin amino acid connected by an all-carbon crosslinker comprising one double bond
  MISC_FEATURE (9)..(16): Crosslink between residues
  MOD_RES (16)..(16): Alpha-Me S5-pentenyl-alanine olefin amino acid connected by an all-carbon crosslinker comprising one double bond
  C-term NH2
IWIAAALRAIGDQFNAYYA

SEQ ID NO: 1337 - protein, 19 aa, Artificial Sequence
  Description of Artificial Sequence: Synthetic peptide
  N-term Ac
  MOD_RES (9)..(9): Alpha-Me R8-octenyl-alanine olefin amino acid connected by an all-carbon crosslinker comprising one double bond
  MISC_FEATURE (9)..(16): Crosslink between residues
  MOD_RES (16)..(16): Alpha-Me S5-pentenyl-alanine olefin amino acid connected by an all-carbon crosslinker comprising one double bond
  C-term NH2
IWIAAALRAIGDAFNAYYA

SEQ ID NO: 1338 - protein, 19 aa, Artificial Sequence
  Description of Artificial Sequence: Synthetic peptide
  N-term Ac
  MOD_RES (9)..(9): Alpha-Me R8-octenyl-alanine olefin amino acid connected by an all-carbon crosslinker comprising one double bond
  MISC_FEATURE (9)..(16): Crosslink between residues
  MOD_RES (16)..(16): Alpha-Me S5-pentenyl-alanine olefin amino acid connected by an all-carbon crosslinker comprising one double bond
  C-term NH2
IWIAQALRAIGDEFAAYYA

SEQ ID NO: 1339 - protein, 19 aa, Artificial Sequence
  Description of Artificial Sequence: Synthetic peptide
  N-term Ac
  MOD_RES (9)..(9): Alpha-Me R8-octenyl-alanine olefin amino acid connected by an all-carbon crosslinker comprising one double bond
  MISC_FEATURE (9)..(16): Crosslink between residues
  MOD_RES (16)..(16): Alpha-Me S5-pentenyl-alanine olefin amino acid connected by an all-carbon crosslinker comprising one double bond
  C-term NH2
IWIAQALRAIGDQFAAYYA

SEQ ID NO: 1340 - protein, 19 aa, Artificial Sequence
  Description of Artificial Sequence: Synthetic peptide
  N-term Ac
  MOD_RES (9)..(9): Alpha-Me R8-octenyl-alanine olefin amino acid connected by an all-carbon crosslinker comprising one double bond
  MISC_FEATURE (9)..(16): Crosslink between residues
  MOD_RES (16)..(16): Alpha-Me S5-pentenyl-alanine olefin amino acid connected by an all-carbon crosslinker comprising one double bond
  C-term NH2
IWIAQALRAIGDAFAAYYA

SEQ ID NO: 1341 - protein, 19 aa, Artificial Sequence
  Description of Artificial Sequence: Synthetic peptide
  N-term Ac
  MOD_RES (8)..(8): Cit
  MOD_RES (9)..(9): Alpha-Me R8-octenyl-alanine olefin amino acid connected by an all-carbon crosslinker comprising one double bond
  MISC_FEATURE (9)..(16): Crosslink between residues
  MOD_RES (16)..(16): Alpha-Me S5-pentenyl-alanine olefin amino acid connected by an all-carbon crosslinker comprising one double bond
  C-term NH2
IWIAQALXAIGDAFNAYYA

SEQ ID NO: 1342 - protein, 19 aa, Artificial Sequence
  Description of Artificial Sequence: Synthetic peptide
  N-term Ac
  MOD_RES (8)..(8): Cit
  MOD_RES (9)..(9): Alpha-Me R8-octenyl-alanine olefin amino acid connected by an all-carbon crosslinker comprising one double bond
  MISC_FEATURE (9)..(16): Crosslink between residues
  MOD_RES (16)..(16): Alpha-Me S5-pentenyl-alanine olefin amino acid connected by an all-carbon crosslinker comprising one double bond
  C-term NH2
IWIAQALXAIGDQFNAYYA

SEQ ID NO: 1343 - protein, 19 aa, Artificial Sequence
  Description of Artificial Sequence: Synthetic peptide
  N-term Ac
  MOD_RES (9)..(9): Alpha-Me R8-octenyl-alanine olefin amino acid connected by an all-carbon crosslinker comprising one double bond
  MISC_FEATURE (9)..(16): Crosslink between residues
  MOD_RES (16)..(16): Alpha-Me S5-pentenyl-alanine olefin amino acid connected by an all-carbon crosslinker comprising one double bond
  C-term NH2
IWIAQALHAIGDAFNAYYA

SEQ ID NO: 1344 - protein, 19 aa, Artificial Sequence
  Description of Artificial Sequence: Synthetic peptide
  N-term Ac
  MOD_RES (9)..(9): Alpha-Me R8-octenyl-alanine olefin amino acid connected by an all-carbon crosslinker comprising one double bond
  MISC_FEATURE (9)..(16): Crosslink between residues
  MOD_RES (16)..(16): Alpha-Me S5-pentenyl-alanine olefin amino acid connected by an all-carbon crosslinker comprising one double bond
  C-term NH2
IWIAQALHAIGDQFNAYYA

SEQ ID NO: 1345 - protein, 19 aa, Artificial Sequence
  Description of Artificial Sequence: Synthetic peptide
  N-term Ac
  MOD_RES (9)..(9): Alpha-Me R8-octenyl-alanine olefin amino acid connected by an all-carbon crosslinker comprising one double bond
  MISC_FEATURE (9)..(16): Crosslink between residues
  MOD_RES (16)..(16): Alpha-Me S5-pentenyl-alanine olefin amino acid connected by an all-carbon crosslinker comprising one double bond
  C-term NH2
IWIAQALQAIGDAFNAYYA

SEQ ID NO: 1346 - protein, 19 aa, Artificial Sequence
  Description of Artificial Sequence: Synthetic peptide
  N-term Ac
  MOD_RES (9)..(9): Alpha-Me R8-octenyl-alanine olefin amino acid connected by an all-carbon crosslinker comprising one double bond
  MISC_FEATURE (9)..(16): Crosslink between residues
  MOD_RES (16)..(16): Alpha-Me S5-pentenyl-alanine olefin amino acid connected by an all-carbon crosslinker comprising one double bond
  C-term NH2
IWIAQALQAIGDQFNAYYA

SEQ ID NO: 1347 - protein, 19 aa, Artificial Sequence
  Description of Artificial Sequence: Synthetic peptide
  N-term Ac
  MOD_RES (9)..(9): Alpha-Me R8-octenyl-alanine olefin amino acid connected by an all-carbon crosslinker comprising one double bond
  MISC_FEATURE (9)..(16): Crosslink between residues
  MOD_RES (16)..(16): Alpha-Me S5-pentenyl-alanine olefin amino acid connected by an all-carbon crosslinker comprising one double bond
  C-term NH2
IWIAQALRAIGDAANAYYA

SEQ ID NO: 1348 - protein, 19 aa, Artificial Sequence
  Description of Artificial Sequence: Synthetic peptide
  N-term Ac
  MOD_RES (9)..(9): Alpha-Me R8-octenyl-alanine olefin amino acid connected by an all-carbon crosslinker comprising one double bond
  MISC_FEATURE (9)..(16): Crosslink between residues
  MOD_RES (16)..(16): Alpha-Me S5-pentenyl-alanine olefin amino acid connected by an all-carbon crosslinker comprising one double bond
  C-term NH2
IWIAQALRAIGDQANAYYA

SEQ ID NO: 1349 - protein, 19 aa, Artificial Sequence
  Description of Artificial Sequence: Synthetic peptide
  N-term Ac
  MOD_RES (9)..(9): Alpha-Me R8-octenyl-alanine olefin amino acid connected by an all-carbon crosslinker comprising one double bond
  MISC_FEATURE (9)..(16): Crosslink between residues
  MOD_RES (16)..(16): Alpha-Me S5-pentenyl-alanine olefin amino acid connected by an all-carbon crosslinker comprising one double bond
  C-term NH2
IWIAQALRAIGDAINAYYA

SEQ ID NO: 1350 - protein, 19 aa, Artificial Sequence
  Description of Artificial Sequence: Synthetic peptide
  N-term Ac
  MOD_RES (9)..(9): Alpha-Me R8-octenyl-alanine olefin amino acid connected by an all-carbon crosslinker comprising one double bond
  MISC_FEATURE (9)..(16): Crosslink between residues
  MOD_RES (16)..(16): Alpha-Me S5-pentenyl-alanine olefin amino acid connected by an all-carbon crosslinker comprising one double bond
  C-term NH2
IWIAQALRAIGDQINAYYA

SEQ ID NO: 1351 - protein, 19 aa, Artificial Sequence
  Description of Artificial Sequence: Synthetic peptide
  N-term Ac
  MOD_RES (9)..(9): Alpha-Me R8-octenyl-alanine olefin amino acid connected by an all-carbon crosslinker comprising one double bond
  MISC_FEATURE (9)..(16): Crosslink between residues
  MOD_RES (16)..(16): Alpha-Me S5-pentenyl-alanine olefin amino acid connected by an all-carbon crosslinker comprising one double bond
  C-term NH2
IWIAQAARAIGDAANAYYA

SEQ ID NO: 1352 - protein, 19 aa, Artificial Sequence
  Description of Artificial Sequence: Synthetic peptide
  N-term Ac
  MOD_RES (9)..(9): Alpha-Me R8-octenyl-alanine olefin amino acid connected by an all-carbon crosslinker comprising one double bond
  MISC_FEATURE (9)..(16): Crosslink between residues
  MOD_RES (16)..(16): Alpha-Me S5-pentenyl-alanine olefin amino acid connected by an all-carbon crosslinker comprising one double bond
  C-term NH2
IWIAQALRAIADAFNAYYA

SEQ ID NO: 1353 - protein, 19 aa, Artificial Sequence
  Description of Artificial Sequence: Synthetic peptide
  N-term Ac
  MOD_RES (9)..(9): Alpha-Me R8-octenyl-alanine olefin amino acid connected by an all-carbon crosslinker comprising one double bond
  MISC_FEATURE (9)..(16): Crosslink between residues
  MOD_RES (16)..(16): Alpha-Me S5-pentenyl-alanine olefin amino acid connected by an all-carbon crosslinker comprising one double bond
  C-term NH2
IWIAQALRAIADQFNAYYA

SEQ ID NO: 1354 - protein, 19 aa, Artificial Sequence
  Description of Artificial Sequence: Synthetic peptide
  N-term Ac
  MOD_RES (9)..(9): Alpha-Me R8-octenyl-alanine olefin amino acid connected by an all-carbon crosslinker comprising one double bond
  MISC_FEATURE (9)..(16): Crosslink between residues
  MOD_RES (16)..(16): Alpha-Me S5-pentenyl-alanine olefin amino acid connected by an all-carbon crosslinker comprising one double bond
  C-term NH2
IWIAQALRAAGDAFNAYYA

SEQ ID NO: 1355 - protein, 19 aa, Artificial Sequence
  Description of Artificial Sequence: Synthetic peptide
  N-term Ac
  MOD_RES (9)..(9): Alpha-Me R8-octenyl-alanine olefin amino acid connected by an all-carbon crosslinker comprising one double bond
  MISC_FEATURE (9)..(16): Crosslink between residues
  MOD_RES (16)..(16): Alpha-Me S5-pentenyl-alanine olefin amino acid connected by an all-carbon crosslinker comprising one double bond
  C-term NH2
IWIAQALRAAGDQFNAYYA

SEQ ID NO: 1356 - protein, 19 aa, Artificial Sequence
  Description of Artificial Sequence: Synthetic peptide
  N-term Ac
  MOD_RES (9)..(9): Alpha-Me R8-octenyl-alanine olefin amino acid connected by an all-carbon crosslinker comprising one double bond
  MISC_FEATURE (9)..(16): Crosslink between residues
  MOD_RES (16)..(16): Alpha-Me S5-pentenyl-alanine olefin amino acid connected by an all-carbon crosslinker comprising one double bond
  C-term NH2
IWIAQALRAFGDAFNAYYA

SEQ ID NO: 1357 - protein, 19 aa, Artificial Sequence
  Description of Artificial Sequence: Synthetic peptide
  N-term Ac
  MOD_RES (9)..(9): Alpha-Me R8-octenyl-alanine olefin amino acid connected by an all-carbon crosslinker comprising one double bond
  MISC_FEATURE (9)..(16): Crosslink between residues
  MOD_RES (16)..(16): Alpha-Me S5-pentenyl-alanine olefin amino acid connected by an all-carbon crosslinker comprising one double bond
  C-term NH2
IWIAQALRAFGDQFNAYYA

SEQ ID NO: 1358 - protein, 19 aa, Artificial Sequence
  Description of Artificial Sequence: Synthetic peptide
  N-term Ac
  MOD_RES (9)..(9): Alpha-Me R8-octenyl-alanine olefin amino acid connected by an all-carbon crosslinker comprising one double bond
  MISC_FEATURE (9)..(16): Crosslink between residues
  MOD_RES (16)..(16): Alpha-Me S5-pentenyl-alanine olefin amino acid connected by an all-carbon crosslinker comprising one double bond
  C-term NH2
IWFAQALRAIGDAFNAYYA

SEQ ID NO: 1359 - protein, 19 aa, Artificial Sequence
  Description of Artificial Sequence: Synthetic peptide
  N-term Ac
  MOD_RES (9)..(9): Alpha-Me R8-octenyl-alanine olefin amino acid connected by an all-carbon crosslinker comprising one double bond
  MISC_FEATURE (9)..(16): Crosslink between residues
  MOD_RES (16)..(16): Alpha-Me S5-pentenyl-alanine olefin amino acid connected by an all-carbon crosslinker comprising one double bond
  C-term NH2
IWFAQALRAIGDQFNAYYA

SEQ ID NO: 1360 - protein, 19 aa, Artificial Sequence
  Description of Artificial Sequence: Synthetic peptide
  N-term Ac
  MOD_RES (9)..(9): Alpha-Me R8-octenyl-alanine olefin amino acid connected by an all-carbon crosslinker comprising one double bond
  MISC_FEATURE (9)..(16): Crosslink between residues
  MOD_RES (16)..(16): Alpha-Me S5-pentenyl-alanine olefin amino acid connected by an all-carbon crosslinker comprising one double bond
  C-term NH2
IAIAQALRAIGDAFNAYYA

SEQ ID NO: 1361 - protein, 19 aa, Artificial Sequence
  Description of Artificial Sequence: Synthetic peptide
  N-term Ac
  MOD_RES (9)..(9): Alpha-Me R8-octenyl-alanine olefin amino acid connected by an all-carbon crosslinker comprising one double bond
  MISC_FEATURE (9)..(16): Crosslink between residues
  MOD_RES (16)..(16): Alpha-Me S5-pentenyl-alanine olefin amino acid connected by an all-carbon crosslinker comprising one double bond
  C-term NH2
IWIAQALAAIGDAFNAYYA

SEQ ID NO: 1362 - protein, 19 aa, Artificial Sequence
  Description of Artificial Sequence: Synthetic peptide
  N-term Ac
  MOD_RES (9)..(9): Alpha-Me R8-octenyl-alanine olefin amino acid connected by an all-carbon crosslinker comprising one double bond
  MISC_FEATURE (9)..(16): Crosslink between residues
  MOD_RES (16)..(16): Alpha-Me S5-pentenyl-alanine olefin amino acid connected by an all-carbon crosslinker comprising one double bond
  C-term NH2
IWIAQALRAIGNAFNAYYA

SEQ ID NO: 1363 - protein, 19 aa, Artificial Sequence
  Description of Artificial Sequence: Synthetic peptide
  N-term Ac
  MOD_RES (9)..(9): Alpha-Me R8-octenyl-alanine olefin amino acid connected by an all-carbon crosslinker comprising one double bond
  MISC_FEATURE (9)..(16): Crosslink between residues
  MOD_RES (16)..(16): Alpha-Me S5-pentenyl-alanine olefin amino acid connected by an all-carbon crosslinker comprising one double bond
  C-term NH2
IWIAQAARAIGDAFNAYYA

SEQ ID NO: 1364 - protein, 20 aa, Artificial Sequence
  Description of Artificial Sequence: Synthetic peptide
  N-term FITC
  MOD_RES (1)..(1): Beta-Ala
  MOD_RES (10)..(10): Alpha-Me R8-octenyl-alanine olefin amino acid connected by an all-carbon crosslinker comprising one double bond
  MISC_FEATURE (10)..(17): Crosslink between residues
  MOD_RES (17)..(17): Alpha-Me S5-pentenyl-alanine olefin amino acid connected by an all-carbon crosslinker comprising one double bond
  C-term NH2
AIWIAQALRAIGDAFNAYYA

SEQ ID NO: 1365 - protein, 20 aa, Artificial Sequence
  Description of Artificial Sequence: Synthetic peptide
  N-term 5-FAM
  MOD_RES (1)..(1): Beta-Ala
  MOD_RES (10)..(10): Alpha-Me R8-octenyl-alanine olefin amino acid connected by an all-carbon crosslinker comprising one double bond
  MISC_FEATURE (10)..(17): Crosslink between residues
  MOD_RES (17)..(17): Alpha-Me S5-pentenyl-alanine olefin amino acid connected by an all-carbon crosslinker comprising one double bond
  C-term NH2
AIWIAQALRAIGDAFNAYYA

SEQ ID NO: 1366 - protein, 20 aa, Artificial Sequence
  Description of Artificial Sequence: Synthetic peptide
  N-term 5-FAM
  MOD_RES (1)..(1): Beta-Ala
  MOD_RES (10)..(10): Alpha-Me R8-octenyl-alanine olefin amino acid connected by an all-carbon crosslinker comprising one double bond
  MISC_FEATURE (10)..(17): Crosslink between residues
  MOD_RES (17)..(17): Alpha-Me S5-pentenyl-alanine olefin amino acid connected by an all-carbon crosslinker comprising one double bond
  C-term NH2
AIWIAQALRAIGDEFNAYYA

SEQ ID NO: 1367 - protein, 14 aa, Artificial Sequence
  Description of Artificial Sequence: Synthetic peptide
  N-term Ac
  MOD_RES (8)..(8): Alpha-Me S5-pentenyl-alanine olefin amino acid connected by an all-carbon crosslinker comprising one double bond
  MISC_FEATURE (8)..(12): Crosslink between residues
  MOD_RES (12)..(12): Alpha-Me S5-pentenyl-alanine olefin amino acid connected by an all-carbon crosslinker comprising one double bond
  C-term NH2
WLAQLLRAIGDAIN

SEQ ID NO: 1368 - protein, 19 aa, Artificial Sequence
  Description of Artificial Sequence: Synthetic peptide
  N-term Ac
  MOD_RES (2)..(2): (S)-2-amino-3-(7-(diethylamino)-2-oxo-2H-chromene-3- carboxamido)propanoic acid
  MOD_RES (9)..(9): Alpha-Me S5-pentenyl-alanine olefin amino acid connected by an all-carbon crosslinker comprising one double bond
  MISC_FEATURE (9)..(13): Crosslink between residues
  MOD_RES (13)..(13): Alpha-Me S5-pentenyl-alanine olefin amino acid connected by an all-carbon crosslinker comprising one double bond
  C-term NH2
IXIALALRAIGDAFNAYYA

SEQ ID NO: 1369 - protein, 19 aa, Artificial Sequence
  Description of Artificial Sequence: Synthetic peptide
  N-term Ac
  MOD_RES (2)..(2): (S)-2-amino-3-(7-(diethylamino)-2-oxo-2H-chromene-3- carboxamido)propanoic acid
  MOD_RES (9)..(9): Alpha-Me S5-pentenyl-alanine olefin amino acid connected by an all-carbon crosslinker comprising one double bond
  MISC_FEATURE (9)..(13): Crosslink between residues
  MOD_RES (13)..(13): Alpha-Me S5-pentenyl-alanine olefin amino acid connected by an all-carbon crosslinker comprising one double bond
  MOD_RES (16)..(16): 2-aminoisobutyric acid
  C-term NH2
IXIALALRAIGDAFNXFYA

SEQ ID NO: 1370 - protein, 21 aa, Artificial Sequence
  Description of Artificial Sequence: Synthetic peptide
  N-term Ac
  MOD_RES (2)..(2): Alpha-Me S5-pentenyl-alanine olefin amino acid connected by an all-carbon crosslinker comprising one double bond
  MISC_FEATURE (2)..(6): Crosslink between residues
  MOD_RES (6)..(6): Alpha-Me S5-pentenyl-alanine olefin amino acid connected by an all-carbon crosslinker comprising one double bond
  MOD_RES (9)..(9): Alpha-Me R8-octenyl-alanine olefin amino acid connected by an all-carbon crosslinker comprising one double bond
  MISC_FEATURE (9)..(16): Crosslink between residues
  MOD_RES (16)..(16): Alpha-Me S5-pentenyl-alanine olefin amino acid connected by an all-carbon crosslinker comprising one double bond
  C-term NH2
IAIAYALRAIGDAFNAYYARR

SEQ ID NO: 1371 - protein, 21 aa, Artificial Sequence
  Description of Artificial Sequence: Synthetic peptide
  N-term Ac
  MOD_RES (2)..(2): Alpha-Me S5-pentenyl-alanine olefin amino acid connected by an all-carbon crosslinker comprising one double bond
  MISC_FEATURE (2)..(6): Crosslink between residues
  MOD_RES (6)..(6): Alpha-Me S5-pentenyl-alanine olefin amino acid connected by an all-carbon crosslinker comprising one double bond
  MOD_RES (9)..(9): Alpha-Me R8-octenyl-alanine olefin amino acid connected by an all-carbon crosslinker comprising one double bond
  MISC_FEATURE (9)..(16): Crosslink between residues
  MOD_RES (16)..(16): Alpha-Me S5-pentenyl-alanine olefin amino acid connected by an all-carbon crosslinker comprising one double bond
  C-term NH2
IAIALALRAIGDAFNAYYARR

SEQ ID NO: 1372 - protein, 21 aa, Artificial Sequence
  Description of Artificial Sequence: Synthetic peptide
  N-term Ac
  MOD_RES (2)..(2): Alpha-Me S5-pentenyl-alanine olefin amino acid connected by an all-carbon crosslinker comprising one double bond
  MISC_FEATURE (2)..(6): Crosslink between residues
  MOD_RES (6)..(6): Alpha-Me S5-pentenyl-alanine olefin amino acid connected by an all-carbon crosslinker comprising one double bond
  MOD_RES (9)..(9): Alpha-Me R8-octenyl-alanine olefin amino acid connected by an all-carbon crosslinker comprising one double bond
  MISC_FEATURE (9)..(16): Crosslink between residues
  MOD_RES (16)..(16): Alpha-Me S5-pentenyl-alanine olefin amino acid connected by an all-carbon crosslinker comprising one double bond
  C-term NH2
IAIAFALRAIGDAFNAYYARR

SEQ ID NO: 1373 - protein, 20 aa, Artificial Sequence
  Description of Artificial Sequence: Synthetic peptide
  N-term Ac
  MOD_RES (2)..(2): Alpha-Me S5-pentenyl-alanine olefin amino acid connected by an all-carbon crosslinker comprising one double bond
  MISC_FEATURE (2)..(6): Crosslink between residues
  MOD_RES (6)..(6): Alpha-Me S5-pentenyl-alanine olefin amino acid connected by an all-carbon crosslinker comprising one double bond
  MOD_RES (9)..(9): Alpha-Me R8-octenyl-alanine olefin amino acid connected by an all-carbon crosslinker comprising one double bond
  MISC_FEATURE (9)..(16): Crosslink between residues
  MOD_RES (16)..(16): Alpha-Me S5-pentenyl-alanine olefin amino acid connected by an all-carbon crosslinker comprising one double bond
  C-term NH2
IAIAQALRAIGDAFNAYYAR

SEQ ID NO: 1374 - protein, 20 aa, Artificial Sequence
  Description of Artificial Sequence: Synthetic peptide
  N-term Ac
  MOD_RES (2)..(2): Alpha-Me S5-pentenyl-alanine olefin amino acid connected by an all-carbon crosslinker comprising one double bond
  MISC_FEATURE (2)..(6): Crosslink between residues
  MOD_RES (6)..(6): Alpha-Me S5-pentenyl-alanine olefin amino acid connected by an all-carbon crosslinker comprising one double bond
  MOD_RES (9)..(9): Alpha-Me R8-octenyl-alanine olefin amino acid connected by an all-carbon crosslinker comprising one double bond
  MISC_FEATURE (9)..(16): Crosslink between residues
  MOD_RES (16)..(16): Alpha-Me S5-pentenyl-alanine olefin amino acid connected by an all-carbon crosslinker comprising one double bond
  C-term NH2
IAIAYALRAIGDAFNAYYAR

SEQ ID NO: 1375 - protein, 20 aa, Artificial Sequence
  Description of Artificial Sequence: Synthetic peptide
  N-term Ac
  MOD_RES (2)..(2): Alpha-Me S5-pentenyl-alanine olefin amino acid connected by an all-carbon crosslinker comprising one double bond
  MISC_FEATURE (2)..(6): Crosslink between residues
  MOD_RES (6)..(6): Alpha-Me S5-pentenyl-alanine olefin amino acid connected by an all-carbon crosslinker comprising one double bond
  MOD_RES (9)..(9): Alpha-Me R8-octenyl-alanine olefin amino acid connected by an all-carbon crosslinker comprising one double bond
  MISC_FEATURE (9)..(16): Crosslink between residues
  MOD_RES (16)..(16): Alpha-Me S5-pentenyl-alanine olefin amino acid connected by an all-carbon crosslinker comprising one double bond
  C-term NH2
IAIALALRAIGDAFNAYYAR

SEQ ID NO: 1376 - protein, 20 aa, Artificial Sequence
  Description of Artificial Sequence: Synthetic peptide
  N-term Ac
  MOD_RES (2)..(2): Alpha-Me S5-pentenyl-alanine olefin amino acid connected by an all-carbon crosslinker comprising one double bond
  MISC_FEATURE (2)..(6): Crosslink between residues
  MOD_RES (6)..(6): Alpha-Me S5-pentenyl-alanine olefin amino acid connected by an all-carbon crosslinker comprising one double bond
  MOD_RES (9)..(9): Alpha-Me R8-octenyl-alanine olefin amino acid connected by an all-carbon crosslinker comprising one double bond
  MISC_FEATURE (9)..(16): Crosslink between residues
  MOD_RES (16)..(16): Alpha-Me S5-pentenyl-alanine olefin amino acid connected by an all-carbon crosslinker comprising one double bond
  C-term NH2
IAIAFALRAIGDAFNAYYAR

SEQ ID NO: 1377 - protein, 19 aa, Artificial Sequence
  Description of Artificial Sequence: Synthetic peptide
  N-term Ac
  MOD_RES (9)..(9): Alpha-Me R8-octenyl-alanine olefin amino acid connected by an all-carbon crosslinker comprising one double bond
  MISC_FEATURE (9)..(16): Crosslink between residues
  MOD_RES (16)..(16): Alpha-Me S5-pentenyl-alanine olefin amino acid connected by an all-carbon crosslinker comprising one double bond
  C-term NH2
IAIAQALRAIGDAFNAYYA

SEQ ID NO: 1378 - protein, 19 aa, Artificial Sequence
  Description of Artificial Sequence: Synthetic peptide
  N-term Ac
  MOD_RES (9)..(9): Alpha-Me R8-octenyl-alanine olefin amino acid connected by an all-carbon crosslinker comprising one double bond
  MISC_FEATURE (9)..(16): Crosslink between residues
  MOD_RES (16)..(16): Alpha-Me S5-pentenyl-alanine olefin amino acid connected by an all-carbon crosslinker comprising one double bond
  C-term NH2
IWIAQALRAIGDEFNAYYA

SEQ ID NO: 1379 - protein, 19 aa, Artificial Sequence
  Description of Artificial Sequence: Synthetic peptide
  N-term Ac
  MOD_RES (9)..(9): Alpha-Me R8-octenyl-alanine olefin amino acid connected by an all-carbon crosslinker comprising one double bond
  MISC_FEATURE (9)..(16): Crosslink between residues
  MOD_RES (16)..(16): Alpha-Me S5-pentenyl-alanine olefin amino acid connected by an all-carbon crosslinker comprising one double bond
  C-term NH2
IWIAQALRAIGDQFNAYYA

SEQ ID NO: 1380 - protein, 19 aa, Artificial Sequence
  Description of Artificial Sequence: Synthetic peptide
  N-term Ac
  MOD_RES (9)..(9): Alpha-Me R8-octenyl-alanine olefin amino acid connected by an all-carbon crosslinker comprising one double bond
  MISC_FEATURE (9)..(16): Crosslink between residues
  MOD_RES (16)..(16): Alpha-Me S5-pentenyl-alanine olefin amino acid connected by an all-carbon crosslinker comprising one double bond
  C-term NH2
IWIAAALRAIGDEFNAYYA

SEQ ID NO: 1381 - protein, 19 aa, Artificial Sequence
  Description of Artificial Sequence: Synthetic peptide
  N-term Ac
  MOD_RES (9)..(9): Alpha-Me R8-octenyl-alanine olefin amino acid connected by an all-carbon crosslinker comprising one double bond
  MISC_FEATURE (9)..(16): Crosslink between residues
  MOD_RES (16)..(16): Alpha-Me S5-pentenyl-alanine olefin amino acid connected by an all-carbon crosslinker comprising one double bond
  C-term NH2
IWIAAALRAIGDQFNAYYA

SEQ ID NO: 1382 - protein, 19 aa, Artificial Sequence
  Description of Artificial Sequence: Synthetic peptide
  N-term Ac
  MOD_RES (9)..(9): Alpha-Me R8-octenyl-alanine olefin amino acid connected by an all-carbon crosslinker comprising one double bond
  MISC_FEATURE (9)..(16): Crosslink between residues
  MOD_RES (16)..(16): Alpha-Me S5-pentenyl-alanine olefin amino acid connected by an all-carbon crosslinker comprising one double bond
  C-term NH2
IWIAAALRAIGDAFNAYYA

SEQ ID NO: 1383 - protein, 19 aa, Artificial Sequence
  Description of Artificial Sequence: Synthetic peptide
  N-term Ac
  MOD_RES (9)..(9): Alpha-Me R8-octenyl-alanine olefin amino acid connected by an all-carbon crosslinker comprising one double bond
  MISC_FEATURE (9)..(16): Crosslink between residues
  MOD_RES (16)..(16): Alpha-Me S5-pentenyl-alanine olefin amino acid connected by an all-carbon crosslinker comprising one double bond
  C-term NH2
IWIAQALRAIGDAFAAYYA

SEQ ID NO: 1384 - protein, 19 aa, Artificial Sequence
  Description of Artificial Sequence: Synthetic peptide
  N-term Ac
  MOD_RES (8)..(8): Cit
  MOD_RES (9)..(9): Alpha-Me R8-octenyl-alanine olefin amino acid connected by an all-carbon crosslinker comprising one double bond
  MISC_FEATURE (9)..(16): Crosslink between residues
  MOD_RES (16)..(16): Alpha-Me S5-pentenyl-alanine olefin amino acid connected by an all-carbon crosslinker comprising one double bond
  C-term NH2
IWIAQALXAIGDAFNAYYA

SEQ ID NO: 1385 - protein, 19 aa, Artificial Sequence
  Description of Artificial Sequence: Synthetic peptide
  N-term Ac
  MOD_RES (8)..(8): Cit
  MOD_RES (9)..(9): Alpha-Me R8-octenyl-alanine olefin amino acid connected by an all-carbon crosslinker comprising one double bond
  MISC_FEATURE (9)..(16): Crosslink between residues
  MOD_RES (16)..(16): Alpha-Me S5-pentenyl-alanine olefin amino acid connected by an all-carbon crosslinker comprising one double bond
  C-term NH2
IWIAQALXAIGDQFNAYYA

SEQ ID NO: 1386 - protein, 19 aa, Artificial Sequence
  Description of Artificial Sequence: Synthetic peptide
  N-term Ac
  MOD_RES (9)..(9): Alpha-Me R8-octenyl-alanine olefin amino acid connected by an all-carbon crosslinker comprising one double bond
  MISC_FEATURE (9)..(16): Crosslink between residues
  MOD_RES (16)..(16): Alpha-Me S5-pentenyl-alanine olefin amino acid connected by an all-carbon crosslinker comprising one double bond
  C-term NH2
IWIAQALHAIGDAFNAYYA

SEQ ID NO: 1387 - protein, 19 aa, Artificial Sequence
  Description of Artificial Sequence: Synthetic peptide
  N-term Ac
  MOD_RES (9)..(9): Alpha-Me R8-octenyl-alanine olefin amino acid connected by an all-carbon crosslinker comprising one double bond
  MISC_FEATURE (9)..(16): Crosslink between residues
  MOD_RES (16)..(16): Alpha-Me S5-pentenyl-alanine olefin amino acid connected by an all-carbon crosslinker comprising one double bond
  C-term NH2
IWIAQALHAIGDQFNAYYA

SEQ ID NO: 1388 - protein, 19 aa, Artificial Sequence
  Description of Artificial Sequence: Synthetic peptide
  N-term Ac
  MOD_RES (9)..(9): Alpha-Me R8-octenyl-alanine olefin amino acid connected by an all-carbon crosslinker comprising one double bond
  MISC_FEATURE (9)..(16): Crosslink between residues
  MOD_RES (16)..(16): Alpha-Me S5-pentenyl-alanine olefin amino acid connected by an all-carbon crosslinker comprising one double bond
  C-term NH2
IWIAQALQAIGDAFNAYYA

SEQ ID NO: 1389 - protein, 19 aa, Artificial Sequence
  Description of Artificial Sequence: Synthetic peptide
  N-term Ac
  MOD_RES (9)..(9): Alpha-Me R8-octenyl-alanine olefin amino acid connected by an all-carbon crosslinker comprising one double bond
  MISC_FEATURE (9)..(16): Crosslink between residues
  MOD_RES (16)..(16): Alpha-Me S5-pentenyl-alanine olefin amino acid connected by an all-carbon crosslinker comprising one double bond
  C-term NH2
IWIAQALQAIGDQFNAYYA

SEQ ID NO: 1390 - protein, 19 aa, Artificial Sequence
  Description of Artificial Sequence: Synthetic peptide
  N-term Ac
  MOD_RES (9)..(9): Alpha-Me R8-octenyl-alanine olefin amino acid connected by an all-carbon crosslinker comprising one double bond
  MISC_FEATURE (9)..(16): Crosslink between residues
  MOD_RES (16)..(16): Alpha-Me S5-pentenyl-alanine olefin amino acid connected by an all-carbon crosslinker comprising one double bond
  C-term NH2
IWIAQALRAIGDAANAYYA

SEQ ID NO: 1391 - protein, 19 aa, Artificial Sequence
  Description of Artificial Sequence: Synthetic peptide
  N-term Ac
  MOD_RES (9)..(9): Alpha-Me R8-octenyl-alanine olefin amino acid connected by an all-carbon crosslinker comprising one double bond
  MISC_FEATURE (9)..(16): Crosslink between residues
  MOD_RES (16)..(16): Alpha-Me S5-pentenyl-alanine olefin amino acid connected by an all-carbon crosslinker comprising one double bond
  C-term NH2
IWIAQALRAIGDAINAYYA

SEQ ID NO: 1392 - protein, 19 aa, Artificial Sequence
  Description of Artificial Sequence: Synthetic peptide
  N-term Ac
  MOD_RES (9)..(9): Alpha-Me R8-octenyl-alanine olefin amino acid connected by an all-carbon crosslinker comprising one double bond
  MISC_FEATURE (9)..(16): Crosslink between residues
  MOD_RES (16)..(16): Alpha-Me S5-pentenyl-alanine olefin amino acid connected by an all-carbon crosslinker comprising one double bond
  C-term NH2
IWIAQALRAIGDQINAYYA

SEQ ID NO: 1393 - protein, 19 aa, Artificial Sequence
  Description of Artificial Sequence: Synthetic peptide
  N-term Ac
  MOD_RES (9)..(9): Alpha-Me R8-octenyl-alanine olefin amino acid connected by an all-carbon crosslinker comprising one double bond
  MISC_FEATURE (9)..(16): Crosslink between residues
  MOD_RES (16)..(16): Alpha-Me S5-pentenyl-alanine olefin amino acid connected by an all-carbon crosslinker comprising one double bond
  C-term NH2
IWIAQAARAIGDAANAYYA

SEQ ID NO: 1394 - protein, 19 aa, Artificial Sequence
  Description of Artificial Sequence: Synthetic peptide
  N-term Ac
  MOD_RES (9)..(9): Alpha-Me R8-octenyl-alanine olefin amino acid connected by an all-carbon crosslinker comprising one double bond
  MISC_FEATURE (9)..(16): Crosslink between residues
  MOD_RES (16)..(16): Alpha-Me S5-pentenyl-alanine olefin amino acid connected by an all-carbon crosslinker comprising one double bond
  C-term NH2
IWIAQALRAIADAFNAYYA

SEQ ID NO: 1395 - protein, 19 aa, Artificial Sequence
  Description of Artificial Sequence: Synthetic peptide
  N-term Ac
  MOD_RES (9)..(9): Alpha-Me R8-octenyl-alanine olefin amino acid connected by an all-carbon crosslinker comprising one double bond
  MISC_FEATURE (9)..(16): Crosslink between residues
  MOD_RES (16)..(16): Alpha-Me S5-pentenyl-alanine olefin amino acid connected by an all-carbon crosslinker comprising one double bond
  C-term NH2
IWIAQALRAIADQFNAYYA

SEQ ID NO: 1396 - protein, 19 aa, Artificial Sequence
  Description of Artificial Sequence: Synthetic peptide
  N-term Ac
  MOD_RES (9)..(9): Alpha-Me R8-octenyl-alanine olefin amino acid connected by an all-carbon crosslinker comprising one double bond
  MISC_FEATURE (9)..(16): Crosslink between residues
  MOD_RES (16)..(16): Alpha-Me S5-pentenyl-alanine olefin amino acid connected by an all-carbon crosslinker comprising one double bond
  C-term NH2
IWIAQALRAAGDAFNAYYA

SEQ ID NO: 1397 - protein, 19 aa, Artificial Sequence
  Description of Artificial Sequence: Synthetic peptide
  N-term Ac
  MOD_RES (9)..(9): Alpha-Me R8-octenyl-alanine olefin amino acid connected by an all-carbon crosslinker comprising one double bond
  MISC_FEATURE (9)..(16): Crosslink between residues
  MOD_RES (16)..(16): Alpha-Me S5-pentenyl-alanine olefin amino acid connected by an all-carbon crosslinker comprising one double bond
  C-term NH2
IWIAQALRAAGDQFNAYYA

SEQ ID NO: 1398 - protein, 19 aa, Artificial Sequence
  Description of Artificial Sequence: Synthetic peptide
  N-term Ac
  MOD_RES (9)..(9): Alpha-Me R8-octenyl-alanine olefin amino acid connected by an all-carbon crosslinker comprising one double bond
  MISC_FEATURE (9)..(16): Crosslink between residues
  MOD_RES (16)..(16): Alpha-Me S5-pentenyl-alanine olefin amino acid connected by an all-carbon crosslinker comprising one double bond
  C-term NH2
IWIAQALRAFGDAFNAYYA

SEQ ID NO: 1399 - protein, 19 aa, Artificial Sequence
  Description of Artificial Sequence: Synthetic peptide
  N-term Ac
  MOD_RES (9)..(9): Alpha-Me R8-octenyl-alanine olefin amino acid connected by an all-carbon crosslinker comprising one double bond
  MISC_FEATURE (9)..(16): Crosslink between residues
  MOD_RES (16)..(16): Alpha-Me S5-pentenyl-alanine olefin amino acid connected by an all-carbon crosslinker comprising one double bond
  C-term NH2
IWIAQALRAFGDQFNAYYA

SEQ ID NO: 1400 - protein, 19 aa, Artificial Sequence
  Description of Artificial Sequence: Synthetic peptide
  N-term Ac
  MOD_RES (9)..(9): Alpha-Me R8-octenyl-alanine olefin amino acid connected by an all-carbon crosslinker comprising one double bond
  MISC_FEATURE (9)..(16): Crosslink between residues
  MOD_RES (16)..(16): Alpha-Me S5-pentenyl-alanine olefin amino acid connected by an all-carbon crosslinker comprising one double bond
  C-term NH2
IWFAQALRAIGDAFNAYYA

SEQ ID NO: 1401 - protein, 19 aa, Artificial Sequence
  Description of Artificial Sequence: Synthetic peptide
  N-term Ac
  MOD_RES (9)..(9): Alpha-Me R8-octenyl-alanine olefin amino acid connected by an all-carbon crosslinker comprising one double bond
  MISC_FEATURE (9)..(16): Crosslink between residues
  MOD_RES (16)..(16): Alpha-Me S5-pentenyl-alanine olefin amino acid connected by an all-carbon crosslinker comprising one double bond
  C-term NH2
IWFAQALRAIGDQFNAYYA

SEQ ID NO: 1402 - protein, 19 aa, Artificial Sequence
  Description of Artificial Sequence: Synthetic peptide
  N-term Ac
  MOD_RES (9)..(9): Alpha-Me R8-octenyl-alanine olefin amino acid connected by an all-carbon crosslinker comprising one double bond
  MISC_FEATURE (9)..(16): Crosslink between residues
  MOD_RES (16)..(16): Alpha-Me S5-pentenyl-alanine olefin amino acid connected by an all-carbon crosslinker comprising one double bond
  C-term NH2
IWIAQALAAIGDAFNAYYA

SEQ ID NO: 1403 - protein, 19 aa, Artificial Sequence
  Description of Artificial Sequence: Synthetic peptide
  N-term Ac
  MOD_RES (9)..(9): Alpha-Me R8-octenyl-alanine olefin amino acid connected by an all-carbon crosslinker comprising one double bond
  MISC_FEATURE (9)..(16): Crosslink between residues
  MOD_RES (16)..(16): Alpha-Me S5-pentenyl-alanine olefin amino acid connected by an all-carbon crosslinker comprising one double bond
  C-term NH2
IWIAQALRAIGNAFNAYYA

SEQ ID NO: 1404 - protein, 19 aa, Artificial Sequence
  Description of Artificial Sequence: Synthetic peptide
  N-term Ac
  MOD_RES (9)..(9): Alpha-Me R8-octenyl-alanine olefin amino acid connected by an all-carbon crosslinker comprising one double bond
  MISC_FEATURE (9)..(16): Crosslink between residues
  MOD_RES (16)..(16): Alpha-Me S5-pentenyl-alanine olefin amino acid connected by an all-carbon crosslinker comprising one double bond
  C-term NH2
IWIAQAARAIGDAFNAYYA

SEQ ID NO: 1405 - protein, 19 aa, Artificial Sequence
  Description of Artificial Sequence: Synthetic peptide
  N-term Ac
  MOD_RES (9)..(9): Alpha-Me S5-pentenyl-alanine olefin amino acid connected by an all-carbon crosslinker comprising one double bond
  MISC_FEATURE (9)..(13): Crosslink between residues
  MOD_RES (13)..(13): Alpha-Me S5-pentenyl-alanine olefin amino acid connected by an all-carbon crosslinker comprising one double bond
  C-term NH2
IWIALALGAIGDAVNAYYA

SEQ ID NO: 1406 - protein, 19 aa, Artificial Sequence
  Description of Artificial Sequence: Synthetic peptide
  N-term Ac
  MOD_RES (9)..(9): Alpha-Me S5-pentenyl-alanine olefin amino acid connected by an all-carbon crosslinker comprising one double bond
  MISC_FEATURE (9)..(13): Crosslink between residues
  MOD_RES (13)..(13): Alpha-Me S5-pentenyl-alanine olefin amino acid connected by an all-carbon crosslinker comprising one double bond
  C-term NH2
IWIALALGAIGDAINAYYA

SEQ ID NO: 1407 - protein, 19 aa, Artificial Sequence
  Description of Artificial Sequence: Synthetic peptide
  N-term Ac
  MOD_RES (9)..(9): Alpha-Me S5-pentenyl-alanine olefin amino acid connected by an all-carbon crosslinker comprising one double bond
  MISC_FEATURE (9)..(13): Crosslink between residues
  MOD_RES (13)..(13): Alpha-Me S5-pentenyl-alanine olefin amino acid connected by an all-carbon crosslinker comprising one double bond
  C-term NH2
IWIALALGAIGNAVNAYYA

SEQ ID NO: 1408 - protein, 19 aa, Artificial Sequence
  Description of Artificial Sequence: Synthetic peptide
  N-term Ac
  MOD_RES (9)..(9): Alpha-Me S5-pentenyl-alanine olefin amino acid connected by an all-carbon crosslinker comprising one double bond
  MISC_FEATURE (9)..(13): Crosslink between residues
  MOD_RES (13)..(13): Alpha-Me S5-pentenyl-alanine olefin amino acid connected by an all-carbon crosslinker comprising one double bond
  C-term NH2
IWIALALGAIGNAINAYYA

SEQ ID NO: 1409 - protein, 19 aa, Artificial Sequence
  Description of Artificial Sequence: Synthetic peptide
  N-term Ac
  MOD_RES (9)..(9): Alpha-Me S5-pentenyl-alanine olefin amino acid connected by an all-carbon crosslinker comprising one double bond
  MISC_FEATURE (9)..(13): Crosslink between residues
  MOD_RES (13)..(13): Alpha-Me S5-pentenyl-alanine olefin amino acid connected by an all-carbon crosslinker comprising one double bond
  C-term NH2
IWIALALNAIGDAVNAYYA

SEQ ID NO: 1410 - protein, 19 aa, Artificial Sequence
  Description of Artificial Sequence: Synthetic peptide
  N-term Ac
  MOD_RES (9)..(9): Alpha-Me S5-pentenyl-alanine olefin amino acid connected by an all-carbon crosslinker comprising one double bond
  MISC_FEATURE (9)..(13): Crosslink between residues
  MOD_RES (13)..(13): Alpha-Me S5-pentenyl-alanine olefin amino acid connected by an all-carbon crosslinker comprising one double bond
  C-term NH2
IWIALALNAIGDAINAYYA

SEQ ID NO: 1411 - protein, 19 aa, Artificial Sequence
  Description of Artificial Sequence: Synthetic peptide
  N-term Ac
  MOD_RES (9)..(9): Alpha-Me S5-pentenyl-alanine olefin amino acid connected by an all-carbon crosslinker comprising one double bond
  MISC_FEATURE (9)..(13): Crosslink between residues
  MOD_RES (13)..(13): Alpha-Me S5-pentenyl-alanine olefin amino acid connected by an all-carbon crosslinker comprising one double bond
  C-term NH2
IWIALALNAIGNAVNAYYA

SEQ ID NO: 1412 - protein, 19 aa, Artificial Sequence
  Description of Artificial Sequence: Synthetic peptide
  N-term Ac
  MOD_RES (9)..(9): Alpha-Me S5-pentenyl-alanine olefin amino acid connected by an all-carbon crosslinker comprising one double bond
  MISC_FEATURE (9)..(13): Crosslink between residues
  MOD_RES (13)..(13): Alpha-Me S5-pentenyl-alanine olefin amino acid connected by an all-carbon crosslinker comprising one double bond
  C-term NH2
IWIALALNAIGNAINAYYA

SEQ ID NO: 1413 - protein, 19 aa, Artificial Sequence
  Description of Artificial Sequence: Synthetic peptide
  N-term Ac
  MOD_RES (9)..(9): Alpha-Me S5-pentenyl-alanine olefin amino acid connected by an all-carbon crosslinker comprising one double bond
  MISC_FEATURE (9)..(13): Crosslink between residues
  MOD_RES (13)..(13): Alpha-Me S5-pentenyl-alanine olefin amino acid connected by an all-carbon crosslinker comprising one double bond
  C-term NH2
IWIALALRAIGDAVNAFYA

SEQ ID NO: 1414 - protein, 19 aa, Artificial Sequence
  Description of Artificial Sequence: Synthetic peptide
  N-term Ac
  MOD_RES (9)..(9): Alpha-Me S5-pentenyl-alanine olefin amino acid connected by an all-carbon crosslinker comprising one double bond
  MISC_FEATURE (9)..(13): Crosslink between residues
  MOD_RES (13)..(13): Alpha-Me S5-pentenyl-alanine olefin amino acid connected by an all-carbon crosslinker comprising one double bond
  C-term NH2
IWIALALRAIGDAVNAYYA

SEQ ID NO: 1415 - protein, 19 aa, Artificial Sequence
  Description of Artificial Sequence: Synthetic peptide
  N-term Ac
  MOD_RES (9)..(9): Alpha-Me S5-pentenyl-alanine olefin amino acid connected by an all-carbon crosslinker comprising one double bond
  MISC_FEATURE (9)..(13): Crosslink between residues
  MOD_RES (13)..(13): Alpha-Me S5-pentenyl-alanine olefin amino acid connected by an all-carbon crosslinker comprising one double bond
  MOD_RES (16)..(16): 2-aminoisobutyric acid
  C-term NH2
IWIALALRAIGDAVNXFYA

SEQ ID NO: 1416 - protein, 19 aa, Artificial Sequence
  Description of Artificial Sequence: Synthetic peptide
  N-term Ac
  MOD_RES (9)..(9): Alpha-Me S5-pentenyl-alanine olefin amino acid connected by an all-carbon crosslinker comprising one double bond
  MISC_FEATURE (9)..(13): Crosslink between residues
  MOD_RES (13)..(13): Alpha-Me S5-pentenyl-alanine olefin amino acid connected by an all-carbon crosslinker comprising one double bond
  MOD_RES (16)..(16): 2-aminoisobutyric acid
  C-term NH2
IWIALALRAIGDAVNXYYA

SEQ ID NO: 1417 - protein, 19 aa, Artificial Sequence
  Description of Artificial Sequence: Synthetic peptide
  N-term Ac
  MOD_RES (9)..(9): Alpha-Me S5-pentenyl-alanine olefin amino acid connected by an all-carbon crosslinker comprising one double bond
  MISC_FEATURE (9)..(13): Crosslink between residues
  MOD_RES (13)..(13): Alpha-Me S5-pentenyl-alanine olefin amino acid connected by an all-carbon crosslinker comprising one double bond
  C-term NH2
IWFALALRAIGDAFNAYYA

SEQ ID NO: 1418 - protein, 19 aa, Artificial Sequence
  Description of Artificial Sequence: Synthetic peptide
  N-term Ac
  MOD_RES (9)..(9): Alpha-Me S5-pentenyl-alanine olefin amino acid connected by an all-carbon crosslinker comprising one double bond
  MISC_FEATURE (9)..(13): Crosslink between residues
  MOD_RES (13)..(13): Alpha-Me S5-pentenyl-alanine olefin amino acid connected by an all-carbon crosslinker comprising one double bond
  C-term NH2
IWYALALRAIGDAFNAYYA

SEQ ID NO: 1419 - protein, 19 aa, Artificial Sequence
  Description of Artificial Sequence: Synthetic peptide
  N-term Ac
  MOD_RES (9)..(9): Alpha-Me S5-pentenyl-alanine olefin amino acid connected by an all-carbon crosslinker comprising one double bond
  MISC_FEATURE (9)..(13): Crosslink between residues
  MOD_RES (13)..(13): Alpha-Me S5-pentenyl-alanine olefin amino acid connected by an all-carbon crosslinker comprising one double bond
  C-term NH2
IWVALALRAIGDAFNAYYA

SEQ ID NO: 1420 - protein, 19 aa, Artificial Sequence
  Description of Artificial Sequence: Synthetic peptide
  N-term Ac
  MOD_RES (9)..(9): Alpha-Me S5-pentenyl-alanine olefin amino acid connected by an all-carbon crosslinker comprising one double bond
  MISC_FEATURE (9)..(13): Crosslink between residues
  MOD_RES (13)..(13): Alpha-Me S5-pentenyl-alanine olefin amino acid connected by an all-carbon crosslinker comprising one double bond
  C-term NH2
IWLALALRAIGDAFNAYYA

SEQ ID NO: 1421 - protein, 19 aa, Artificial Sequence
  Description of Artificial Sequence: Synthetic peptide
  N-term Ac
  MOD_RES (9)..(9): Alpha-Me S5-pentenyl-alanine olefin amino acid connected by an all-carbon crosslinker comprising one double bond
  MISC_FEATURE (9)..(13): Crosslink between residues
  MOD_RES (13)..(13): Alpha-Me S5-pentenyl-alanine olefin amino acid connected by an all-carbon crosslinker comprising one double bond
  C-term NH2
IWIAQALRAIGDAVNAYYA

SEQ ID NO: 1422 - protein, 19 aa, Artificial Sequence
  Description of Artificial Sequence: Synthetic peptide
  N-term Ac
  MOD_RES (9)..(9): Alpha-Me S5-pentenyl-alanine olefin amino acid connected by an all-carbon crosslinker comprising one double bond
  MISC_FEATURE (9)..(13): Crosslink between residues
  MOD_RES (13)..(13): Alpha-Me S5-pentenyl-alanine olefin amino acid connected by an all-carbon crosslinker comprising one double bond
  C-term NH2
IWIAQALRAIGDAINAYYA

SEQ ID NO: 1423 - protein, 19 aa, Artificial Sequence
  Description of Artificial Sequence: Synthetic peptide
  N-term Ac
  MOD_RES (9)..(9): Alpha-Me S5-pentenyl-alanine olefin amino acid connected by an all-carbon crosslinker comprising one double bond
  MISC_FEATURE (9)..(13): Crosslink between residues
  MOD_RES (13)..(13): Alpha-Me S5-pentenyl-alanine olefin amino acid connected by an all-carbon crosslinker comprising one double bond
  C-term NH2
IWIALALRAIGDAINAYYA

SEQ ID NO: 1424 - protein, 19 aa, Artificial Sequence
  Description of Artificial Sequence: Synthetic peptide
  N-term Ac
  MOD_RES (9)..(9): Alpha-Me S5-pentenyl-alanine olefin amino acid connected by an all-carbon crosslinker comprising one double bond
  MISC_FEATURE (9)..(13): Crosslink between residues
  MOD_RES (13)..(13): Alpha-Me S5-pentenyl-alanine olefin amino acid connected by an all-carbon crosslinker comprising one double bond
  C-term NH2
IWIALLLRAIGDAVNAYYA

SEQ ID NO: 1425 - protein, 19 aa, Artificial Sequence
  Description of Artificial Sequence: Synthetic peptide
  N-term Ac
  MOD_RES (9)..(9): Alpha-Me S5-pentenyl-alanine olefin amino acid connected by an all-carbon crosslinker comprising one double bond
  MISC_FEATURE (9)..(13): Crosslink between residues
  MOD_RES (13)..(13): Alpha-Me S5-pentenyl-alanine olefin amino acid connected by an all-carbon crosslinker comprising one double bond
  C-term NH2
IWIALLLRAIGDAINAYYA

SEQ ID NO: 1426 - protein, 19 aa, Artificial Sequence
  Description of Artificial Sequence: Synthetic peptide
  N-term Ac
  MOD_RES (9)..(9): Alpha-Me S5-pentenyl-alanine olefin amino acid connected by an all-carbon crosslinker comprising one double bond
  MISC_FEATURE (9)..(13): Crosslink between residues
  MOD_RES (13)..(13): Alpha-Me S5-pentenyl-alanine olefin amino acid connected by an all-carbon crosslinker comprising one double bond
  C-term NH2
IWIALALGAIGDAFNAYYA

SEQ ID NO: 1427 - protein, 19 aa, Artificial Sequence
  Description of Artificial Sequence: Synthetic peptide
  N-term Ac
  MOD_RES (9)..(9): Alpha-Me S5-pentenyl-alanine olefin amino acid connected by an all-carbon crosslinker comprising one double bond
  MISC_FEATURE (9)..(13): Crosslink between residues
  MOD_RES (13)..(13): Alpha-Me S5-pentenyl-alanine olefin amino acid connected by an all-carbon crosslinker comprising one double bond
  C-term NH2
IWIALALSAIGDAFNAYYA

SEQ ID NO: 1428 - protein, 19 aa, Artificial Sequence
  Description of Artificial Sequence: Synthetic peptide
  N-term Ac
  MOD_RES (9)..(9): Alpha-Me S5-pentenyl-alanine olefin amino acid connected by an all-carbon crosslinker comprising one double bond
  MISC_FEATURE (9)..(13): Crosslink between residues
  MOD_RES (13)..(13): Alpha-Me S5-pentenyl-alanine olefin amino acid connected by an all-carbon crosslinker comprising one double bond
  C-term NH2
IWIALALHAIGDAFNAYYA

SEQ ID NO: 1429 - protein, 19 aa, Artificial Sequence
  Description of Artificial Sequence: Synthetic peptide
  N-term Ac
  MOD_RES (9)..(9): Alpha-Me S5-pentenyl-alanine olefin amino acid connected by an all-carbon crosslinker comprising one double bond
  MISC_FEATURE (9)..(13): Crosslink between residues
  MOD_RES (13)..(13): Alpha-Me S5-pentenyl-alanine olefin amino acid connected by an all-carbon crosslinker comprising one double bond
  C-term NH2
IWIALALNAIGDAFNAYYA

SEQ ID NO: 1430 - protein, 19 aa, Artificial Sequence
  Description of Artificial Sequence: Synthetic peptide
  N-term Ac
  MOD_RES (9)..(9): Alpha-Me S5-pentenyl-alanine olefin amino acid connected by an all-carbon crosslinker comprising one double bond
  MISC_FEATURE (9)..(13): Crosslink between residues
  MOD_RES (13)..(13): Alpha-Me S5-pentenyl-alanine olefin amino acid connected by an all-carbon crosslinker comprising one double bond
  C-term NH2
IWIALAIGAIGDAVNAYYA

SEQ ID NO: 1431 - protein, 19 aa, Artificial Sequence
  Description of Artificial Sequence: Synthetic peptide
  N-term Ac
  MOD_RES (9)..(9): Alpha-Me S5-pentenyl-alanine olefin amino acid connected by an all-carbon crosslinker comprising one double bond
  MISC_FEATURE (9)..(13): Crosslink between residues
  MOD_RES (13)..(13): Alpha-Me S5-pentenyl-alanine olefin amino acid connected by an all-carbon crosslinker comprising one double bond
  C-term NH2
IWIALAIGAIGDAINAYYA

SEQ ID NO: 1432 - protein, 19 aa, Artificial Sequence
  Description of Artificial Sequence: Synthetic peptide
  N-term Ac
  MOD_RES (9)..(9): Alpha-Me S5-pentenyl-alanine olefin amino acid connected by an all-carbon crosslinker comprising one double bond
  MISC_FEATURE (9)..(13): Crosslink between residues
  MOD_RES (13)..(13): Alpha-Me S5-pentenyl-alanine olefin amino acid connected by an all-carbon crosslinker comprising one double bond
  C-term NH2
IWIALAINAIGDAVNAYYA

SEQ ID NO: 1433 - protein, 19 aa, Artificial Sequence
  Description of Artificial Sequence: Synthetic peptide
  N-term Ac
  MOD_RES (9)..(9): Alpha-Me S5-pentenyl-alanine olefin amino acid connected by an all-carbon crosslinker comprising one double bond
  MISC_FEATURE (9)..(13): Crosslink between residues
  MOD_RES (13)..(13): Alpha-Me S5-pentenyl-alanine olefin amino acid connected by an all-carbon crosslinker comprising one double bond
  C-term NH2
IWIALAINAIGDAINAYYA

SEQ ID NO: 1434 - protein, 21 aa, Artificial Sequence
  Description of Artificial Sequence: Synthetic peptide
  N-term Ac
  MOD_RES (9)..(9): Alpha-Me S5-pentenyl-alanine olefin amino acid connected by an all-carbon crosslinker comprising one double bond
  MISC_FEATURE (9)..(13): Crosslink between residues
  MOD_RES (13)..(13): Alpha-Me S5-pentenyl-alanine olefin amino acid connected by an all-carbon crosslinker comprising one double bond
  C-term NH2
IWIALALNAIGDAVNAYYAHH

SEQ ID NO: 1435 - protein, 21 aa, Artificial Sequence
  Description of Artificial Sequence: Synthetic peptide
  N-term Ac
  MOD_RES (9)..(9): Alpha-Me S5-pentenyl-alanine olefin amino acid connected by an all-carbon crosslinker comprising one double bond
  MISC_FEATURE (9)..(13): Crosslink between residues
  MOD_RES (13)..(13): Alpha-Me S5-pentenyl-alanine olefin amino acid connected by an all-carbon crosslinker comprising one double bond
  C-term NH2
IWIALALNAIGDAINAYYAHH

SEQ ID NO: 1436 - protein, 21 aa, Artificial Sequence
  Description of Artificial Sequence: Synthetic peptide
  N-term Ac
  MOD_RES (9)..(9): Alpha-Me S5-pentenyl-alanine olefin amino acid connected by an all-carbon crosslinker comprising one double bond
  MISC_FEATURE (9)..(13): Crosslink between residues
  MOD_RES (13)..(13): Alpha-Me S5-pentenyl-alanine olefin amino acid connected by an all-carbon crosslinker comprising one double bond
  C-term NH2
IWIALALNAIGNAVNAYYAHH

SEQ ID NO: 1437 - protein, 21 aa, Artificial Sequence
  Description of Artificial Sequence: Synthetic peptide
  N-term Ac
  MOD_RES (9)..(9): Alpha-Me S5-pentenyl-alanine olefin amino acid connected by an all-carbon crosslinker comprising one double bond
  MISC_FEATURE (9)..(13): Crosslink between residues
  MOD_RES (13)..(13): Alpha-Me S5-pentenyl-alanine olefin amino acid connected by an all-carbon crosslinker comprising one double bond
  C-term NH2
IWIALALNAIGNAINAYYAHH

SEQ ID NO: 1438 - protein, 19 aa, Artificial Sequence
  Description of Artificial Sequence: Synthetic peptide
  N-term Ac
  MOD_RES (5)..(5): Alpha-Me R5-pentenyl-alanine olefin amino acid connected by an all-carbon crosslinker comprising one double bond
  MISC_FEATURE (5)..(9): Crosslink between residues
  MOD_RES (9)..(9): Two pentenyl-alanine olefin side chains, each of which is crosslinked to another amino acid as indicated
  MISC_FEATURE (9)..(13): Crosslink between residues
  MOD_RES (13)..(13): Alpha-Me S5-pentenyl-alanine olefin amino acid connected by an all-carbon crosslinker comprising one double bond
  C-term NH2
IWIAAALGAIGDAVNAYYA

SEQ ID NO: 1439 - protein, 19 aa, Artificial Sequence
  Description of Artificial Sequence: Synthetic peptide
  N-term Ac
  MOD_RES (5)..(5): Alpha-Me R5-pentenyl-alanine olefin amino acid connected by an all-carbon crosslinker comprising one double bond
  MISC_FEATURE (5)..(9): Crosslink between residues
  MOD_RES (9)..(9): Two pentenyl-alanine olefin side chains, each of which is crosslinked to another amino acid as indicated
  MISC_FEATURE (9)..(13): Crosslink between residues
  MOD_RES (13)..(13): Alpha-Me S5-pentenyl-alanine olefin amino acid connected by an all-carbon crosslinker comprising one double bond
  C-term NH2
IWIAAALGAIGDAINAYYA

SEQ ID NO: 1440 - protein, 19 aa, Artificial Sequence
  Description of Artificial Sequence: Synthetic peptide
  N-term Ac
  MOD_RES (5)..(5): Alpha-Me R5-pentenyl-alanine olefin amino acid connected by an all-carbon crosslinker comprising one double bond
  MISC_FEATURE (5)..(9): Crosslink between residues
  MOD_RES (9)..(9): Two pentenyl-alanine olefin side chains, each of which is crosslinked to another amino acid as indicated
  MISC_FEATURE (9)..(13): Crosslink between residues
  MOD_RES (13)..(13): Alpha-Me S5-pentenyl-alanine olefin amino acid connected by an all-carbon crosslinker comprising one double bond
  C-term NH2
IWIAAALGAIGNAVNAYYA

SEQ ID NO: 1441 - protein, 19 aa, Artificial Sequence
  Description of Artificial Sequence: Synthetic peptide
  N-term Ac
  MOD_RES (5)..(5): Alpha-Me R5-pentenyl-alanine olefin amino acid connected by an all-carbon crosslinker comprising one double bond
  MISC_FEATURE (5)..(9): Crosslink between residues
  MOD_RES (9)..(9): Two pentenyl-alanine olefin side chains, each of which is crosslinked to another amino acid as indicated
  MISC_FEATURE (9)..(13): Crosslink between residues
  MOD_RES (13)..(13): Alpha-Me S5-pentenyl-alanine olefin amino acid connected by an all-carbon crosslinker comprising one double bond
  C-term NH2
IWIAAALGAIGNAINAYYA

SEQ ID NO: 1442 - protein, 19 aa, Artificial Sequence
  Description of Artificial Sequence: Synthetic peptide
  N-term Ac
  MOD_RES (9)..(9): Alpha-Me S5-pentenyl-alanine olefin amino acid connected by an all-carbon crosslinker comprising one double bond
  MISC_FEATURE (9)..(13): Crosslink between residues
  MOD_RES (13)..(13): Alpha-Me S5-pentenyl-alanine olefin amino acid connected by an all-carbon crosslinker comprising one double bond
  C-term NH2
IWIALALRAIGDAVNAAAA

SEQ ID NO: 1443 - protein, 19 aa, Artificial Sequence
  Description of Artificial Sequence: Synthetic peptide
  N-term Ac
  MOD_RES (9)..(9): Alpha-Me S5-pentenyl-alanine olefin amino acid connected by an all-carbon crosslinker comprising one double bond
  MISC_FEATURE (9)..(13): Crosslink between residues
  MOD_RES (13)..(13): Alpha-Me S5-pentenyl-alanine olefin amino acid connected by an all-carbon crosslinker comprising one double bond
  C-term NH2
IWIALALGAIGDAVNAAAA

SEQ ID NO: 1444 - protein, 19 aa, Artificial Sequence
  Description of Artificial Sequence: Synthetic peptide
  N-term Ac
  MOD_RES (9)..(9): Alpha-Me S5-pentenyl-alanine olefin amino acid connected by an all-carbon crosslinker comprising one double bond
  MISC_FEATURE (9)..(13): Crosslink between residues
  MOD_RES (13)..(13): Alpha-Me S5-pentenyl-alanine olefin amino acid connected by an all-carbon crosslinker comprising one double bond
  C-term NH2
IWIALALDAIGDAVNAAAA

SEQ ID NO: 1445 - protein, 19 aa, Artificial Sequence
  Description of Artificial Sequence: Synthetic peptide
  N-term Ac
  MOD_RES (9)..(9): Alpha-Me S5-pentenyl-alanine olefin amino acid connected by an all-carbon crosslinker comprising one double bond
  MISC_FEATURE (9)..(13): Crosslink between residues
  MOD_RES (13)..(13): Alpha-Me S5-pentenyl-alanine olefin amino acid connected by an all-carbon crosslinker comprising one double bond
  C-term NH2
IWIALALNAIGDAVNAAAA

SEQ ID NO: 1446 - protein, 15 aa, Artificial Sequence
  Description of Artificial Sequence: Synthetic peptide
  N-term Ac
  MOD_RES (9)..(9): Alpha-Me S5-pentenyl-alanine olefin amino acid connected by an all-carbon crosslinker comprising one double bond
  MISC_FEATURE (9)..(13): Crosslink between residues
  MOD_RES (13)..(13): Alpha-Me S5-pentenyl-alanine olefin amino acid connected by an all-carbon crosslinker comprising one double bond
  C-term NH2
IWIALALRAIGDAVN

SEQ ID NO: 1447 - protein, 15 aa, Artificial Sequence
  Description of Artificial Sequence: Synthetic peptide
  N-term Ac
  MOD_RES (9)..(9): Alpha-Me S5-pentenyl-alanine olefin amino acid connected by an all-carbon crosslinker comprising one double bond
  MISC_FEATURE (9)..(13): Crosslink between residues
  MOD_RES (13)..(13): Alpha-Me S5-pentenyl-alanine olefin amino acid connected by an all-carbon crosslinker comprising one double bond
  C-term NH2
IWIALALGAIGDAVN

SEQ ID NO: 1448 - protein, 15 aa, Artificial Sequence
  Description of Artificial Sequence: Synthetic peptide
  N-term Ac
  MOD_RES (9)..(9): Alpha-Me S5-pentenyl-alanine olefin amino acid connected by an all-carbon crosslinker comprising one double bond
  MISC_FEATURE (9)..(13): Crosslink between residues
  MOD_RES (13)..(13): Alpha-Me S5-pentenyl-alanine olefin amino acid connected by an all-carbon crosslinker comprising one double bond
  C-term NH2
IWIALALDAIGDAVN

SEQ ID NO: 1449 - protein, 15 aa, Artificial Sequence
  Description of Artificial Sequence: Synthetic peptide
  N-term Ac
  MOD_RES (9)..(9): Alpha-Me S5-pentenyl-alanine olefin amino acid connected by an all-carbon crosslinker comprising one double bond
  MISC_FEATURE (9)..(13): Crosslink between residues
  MOD_RES (13)..(13): Alpha-Me S5-pentenyl-alanine olefin amino acid connected by an all-carbon crosslinker comprising one double bond
  C-term NH2
IWIALALNAIGDAVN

SEQ ID NO: 1450 - protein, 20 aa, Artificial Sequence
  Description of Artificial Sequence: Synthetic peptide
  N-term 5-FAM
  MOD_RES (1)..(1): Beta-Ala
  MOD_RES (6)..(6): Alpha-Me R5-pentenyl-alanine olefin amino acid connected by an all-carbon crosslinker comprising one double bond
  MISC_FEATURE (6)..(10): Crosslink between residues
  MOD_RES (10)..(10): Two pentenyl-alanine olefin side chains, each of which is crosslinked to another amino acid as indicated
  MISC_FEATURE (10)..(14): Crosslink between residues
  MOD_RES (14)..(14): Alpha-Me S5-pentenyl-alanine olefin amino acid connected by an all-carbon crosslinker comprising one double bond
  C-term NH2
AIWIAAALGAIGDAVNAYYA

SEQ ID NO: 1451 - protein, 20 aa, Artificial Sequence
  Description of Artificial Sequence: Synthetic peptide
  N-term 5-FAM
  MOD_RES (1)..(1): Beta-Ala
  MOD_RES (10)..(10): Alpha-Me S5-pentenyl-alanine olefin amino acid connected by an all-carbon crosslinker comprising one double bond
  MISC_FEATURE (10)..(14): Crosslink between residues
  MOD_RES (14)..(14): Alpha-Me S5-pentenyl-alanine olefin amino acid connected by an all-carbon crosslinker comprising one double bond
  MOD_RES (17)..(17): 2-aminoisobutyric acid
  C-term NH2
AIWIALALRAIGDAFNXFYA

SEQ ID NO: 1452 - protein, 20 aa, Artificial Sequence
  Description of Artificial Sequence: Synthetic peptide
  N-term 5-FAM
  MOD_RES (1)..(1): Beta-Ala
  MOD_RES (6)..(6): Alpha-Me R5-pentenyl-alanine olefin amino acid connected by an all-carbon crosslinker comprising one double bond
  MISC_FEATURE (6)..(10): Crosslink between residues
  MOD_RES (10)..(10): Two pentenyl-alanine olefin side chains, each of which is crosslinked to another amino acid as indicated
  MISC_FEATURE (10)..(14): Crosslink between residues
  MOD_RES (14)..(14): Alpha-Me S5-pentenyl-alanine olefin amino acid connected by an all-carbon crosslinker comprising one double bond
  C-term NH2
AIWIAAALGAIGNAINAYYA

SEQ ID NO: 1453 - protein, 20 aa, Artificial Sequence
  Description of Artificial Sequence: Synthetic peptide
  N-term 5-FAM
  MOD_RES (1)..(1): Beta-Ala
  MOD_RES (10)..(10): Alpha-Me S5-pentenyl-alanine olefin amino acid connected by an all-carbon crosslinker comprising one double bond
  MISC_FEATURE (10)..(14): Crosslink between residues
  MOD_RES (14)..(14): Alpha-Me S5-pentenyl-alanine olefin amino acid connected by an all-carbon crosslinker comprising one double bond
  C-term NH2
AIWIALALGAIGNAINAYYA

SEQ ID NO: 1454 - protein, 20 aa, Artificial Sequence
  Description of Artificial Sequence: Synthetic peptide
  N-term FITC
  MOD_RES (1)..(1): Beta-Ala
  MOD_RES (6)..(6): Alpha-Me R5-pentenyl-alanine olefin amino acid connected by an all-carbon crosslinker comprising one double bond
  MISC_FEATURE (6)..(10): Crosslink between residues
  MOD_RES (10)..(10): Two pentenyl-alanine olefin side chains, each of which is crosslinked to another amino acid as indicated
  MISC_FEATURE (10)..(14): Crosslink between residues
  MOD_RES (14)..(14): Alpha-Me S5-pentenyl-alanine olefin amino acid connected by an all-carbon crosslinker comprising one double bond
  C-term NH2
AIWIAAALGAIGDAVNAYYA

SEQ ID NO: 1455 - protein, 20 aa, Artificial Sequence
  Description of Artificial Sequence: Synthetic peptide
  N-term FITC
  MOD_RES (1)..(1): Beta-Ala
  MOD_RES (10)..(10): Alpha-Me S5-pentenyl-alanine olefin amino acid connected by an all-carbon crosslinker comprising one double bond
  MISC_FEATURE (10)..(14): Crosslink between residues
  MOD_RES (14)..(14): Alpha-Me S5-pentenyl-alanine olefin amino acid connected by an all-carbon crosslinker comprising one double bond
  MOD_RES (17)..(17): 2-aminoisobutyric acid
  C-term NH2
AIWIALALRAIGDAFNXFYA

SEQ ID NO: 1456 - protein, 20 aa, Artificial Sequence
  Description of Artificial Sequence: Synthetic peptide
  N-term 5-FAM
  MOD_RES (1)..(1): Beta-Ala
  MOD_RES (6)..(6): Alpha-Me R5-pentenyl-alanine olefin amino acid connected by an all-carbon crosslinker comprising one double bond
  MISC_FEATURE (6)..(10): Crosslink between residues
  MOD_RES (10)..(10): Two pentenyl-alanine olefin side chains, each of which is crosslinked to another amino acid as indicated
  MISC_FEATURE (10)..(14): Crosslink between residues
  MOD_RES (14)..(14): Alpha-Me S5-pentenyl-alanine olefin amino acid connected by an all-carbon crosslinker comprising one double bond
  C-term NH2
AIWIAAALGAIGDAINAYYA

SEQ ID NO: 1457 - protein, 19 aa, Artificial Sequence
  Description of Artificial Sequence: Synthetic peptide
  N-term Ac
  MOD_RES (9)..(9): Alpha-Me R8-octenyl-alanine olefin amino acid connected by an all-carbon crosslinker comprising one double bond
  MISC_FEATURE (9)..(16): Crosslink between residues
  MOD_RES (16)..(16): Alpha-Me S5-pentenyl-alanine olefin amino acid connected by an all-carbon crosslinker comprising one double bond
  C-term NH2
IWIAQALRAIGDQFAAYYA

SEQ ID NO: 1458 - protein, 21 aa, Artificial Sequence
  Description of Artificial Sequence: Synthetic peptide
  N-term Ac
  MOD_RES (9)..(9): Alpha-Me S5-pentenyl-alanine olefin amino acid connected by an all-carbon crosslinker comprising one double bond
  MISC_FEATURE (9)..(13): Crosslink between residues
  MOD_RES (13)..(13): Alpha-Me S5-pentenyl-alanine olefin amino acid connected by an all-carbon crosslinker comprising one double bond
  C-term NH2
RWIAQALRAIGDALNAFYAHH

SEQ ID NO: 1459 - protein, 21 aa, Artificial Sequence
  Description of Artificial Sequence: Synthetic peptide
  N-term Ac
  MOD_RES (9)..(9): Alpha-Me S5-pentenyl-alanine olefin amino acid connected by an all-carbon crosslinker comprising one double bond
  MISC_FEATURE (9)..(13): Crosslink between residues
  MOD_RES (13)..(13): Alpha-Me S5-pentenyl-alanine olefin amino acid connected by an all-carbon crosslinker comprising one double bond
  MOD_RES (16)..(16): 2-aminoisobutyric acid
  C-term NH2
RWIAQELRAIGDALNXFYAHH

SEQ ID NO: 1460 - protein, 19 aa, Artificial Sequence
  Description of Artificial Sequence: Synthetic peptide
  N-term Ac
  MOD_RES (9)..(9): Alpha-Me S5-pentenyl-alanine olefin amino acid connected by an all-carbon crosslinker comprising one double bond
  MISC_FEATURE (9)..(13): Crosslink between residues
  MOD_RES (13)..(13): Alpha-Me S5-pentenyl-alanine olefin amino acid connected by an all-carbon crosslinker comprising one double bond
  MOD_RES (16)..(16): 2-aminoisobutyric acid
  C-term NH2
RWIAQALRAIGDALNXFYA

SEQ ID NO: 1461 - protein, 21 aa, Artificial Sequence
  Description of Artificial Sequence: Synthetic peptide
  N-term Ac
  MOD_RES (9)..(9): Alpha-Me S5-pentenyl-alanine olefin amino acid connected by an all-carbon crosslinker comprising one double bond
  MISC_FEATURE (9)..(13): Crosslink between residues
  MOD_RES (13)..(13): Alpha-Me S5-pentenyl-alanine olefin amino acid connected by an all-carbon crosslinker comprising one double bond
  MOD_RES (16)..(16): 2-aminoisobutyric acid
  C-term NH2
RWIAQAARAIGDALNXFYAHH

SEQ ID NO: 1462 - protein, 21 aa, Artificial Sequence
  Description of Artificial Sequence: Synthetic peptide
  N-term Ac
  MOD_RES (9)..(9): Alpha-Me S5-pentenyl-alanine olefin amino acid connected by an all-carbon crosslinker comprising one double bond
  MISC_FEATURE (9)..(13): Crosslink between residues
  MOD_RES (13)..(13): Alpha-Me S5-pentenyl-alanine olefin amino acid connected by an all-carbon crosslinker comprising one double bond
  MOD_RES (16)..(16): 2-aminoisobutyric acid
  C-term NH2
RWIAQALAAIGDALNXFYAHH

SEQ ID NO: 1463 - protein, 21 aa, Artificial Sequence
  Description of Artificial Sequence: Synthetic peptide
  N-term Ac
  MOD_RES (9)..(9): Alpha-Me S5-pentenyl-alanine olefin amino acid connected by an all-carbon crosslinker comprising one double bond
  MISC_FEATURE (9)..(13): Crosslink between residues
  MOD_RES (13)..(13): Alpha-Me S5-pentenyl-alanine olefin amino acid connected by an all-carbon crosslinker comprising one double bond
  MOD_RES (16)..(16): 2-aminoisobutyric acid
  C-term NH2
RWIAQALRAIGNALNXFYAHH

SEQ ID NO: 1464 - protein, 21 aa, Artificial Sequence
  Description of Artificial Sequence: Synthetic peptide
  N-term Ac
  MOD_RES (8)..(8): Cit
  MOD_RES (9)..(9): Alpha-Me S5-pentenyl-alanine olefin amino acid connected by an all-carbon crosslinker comprising one double bond
  MISC_FEATURE (9)..(13): Crosslink between residues
  MOD_RES (13)..(13): Alpha-Me S5-pentenyl-alanine olefin amino acid connected by an all-carbon crosslinker comprising one double bond
  MOD_RES (16)..(16): 2-aminoisobutyric acid
  C-term NH2
RWIAQALXAIGDALNXFYAHH

SEQ ID NO: 1465 - protein, 21 aa, Artificial Sequence
  Description of Artificial Sequence: Synthetic peptide
  N-term Ac
  MOD_RES (9)..(9): Alpha-Me S5-pentenyl-alanine olefin amino acid connected by an all-carbon crosslinker comprising one double bond
  MISC_FEATURE (9)..(13): Crosslink between residues
  MOD_RES (13)..(13): Alpha-Me S5-pentenyl-alanine olefin amino acid connected by an all-carbon crosslinker comprising one double bond
  MOD_RES (16)..(16): 2-aminoisobutyric acid
  C-term NH2
RWIAQALRAIGDAANXFYAHH

SEQ ID NO: 1466 - protein, 21 aa, Artificial Sequence
  Description of Artificial Sequence: Synthetic peptide
  N-term Ac
  MOD_RES (2)..(2): (S)-2-amino-3-(7-(diethylamino)-2-oxo-2H-chromene-3- carboxamido)propanoic acid
  MOD_RES (9)..(9): Alpha-Me S5-pentenyl-alanine olefin amino acid connected by an all-carbon crosslinker comprising one double bond
  MISC_FEATURE (9)..(13): Crosslink between residues
  MOD_RES (13)..(13): Alpha-Me S5-pentenyl-alanine olefin amino acid connected by an all-carbon crosslinker comprising one double bond
  MOD_RES (16)..(16): 2-aminoisobutyric acid
  C-term NH2
RXIAQAARAIGDALNXFYAHH

SEQ ID NO: 1467 - protein, 21 aa, Artificial Sequence
  Description of Artificial Sequence: Synthetic peptide
  N-term Ac
  MOD_RES (2)..(2): (S)-2-amino-3-(7-(diethylamino)-2-oxo-2H-chromene-3- carboxamido)propanoic acid
  MOD_RES (9)..(9): Alpha-Me S5-pentenyl-alanine olefin amino acid connected by an all-carbon crosslinker comprising one double bond
  MISC_FEATURE (9)..(13): Crosslink between residues
  MOD_RES (13)..(13): Alpha-Me S5-pentenyl-alanine olefin amino acid connected by an all-carbon crosslinker comprising one double bond
  MOD_RES (16)..(16): 2-aminoisobutyric acid
  C-term NH2
RXIAQALAAIGDALNXFYAHH

SEQ ID NO: 1468 - protein, 21 aa, Artificial Sequence
  Description of Artificial Sequence: Synthetic peptide
  N-term Ac
  MOD_RES (2)..(2): (S)-2-amino-3-(7-(diethylamino)-2-oxo-2H-chromene-3- carboxamido)propanoic acid
  MOD_RES (9)..(9): Alpha-Me S5-pentenyl-alanine olefin amino acid connected by an all-carbon crosslinker comprising one double bond
  MISC_FEATURE (9)..(13): Crosslink between residues
  MOD_RES (13)..(13): Alpha-Me S5-pentenyl-alanine olefin amino acid connected by an all-carbon crosslinker comprising one double bond
  MOD_RES (16)..(16): 2-aminoisobutyric acid
  C-term NH2
RXIAQALRAIGNALNXFYAHH

SEQ ID NO: 1469 - protein, 21 aa, Artificial Sequence
  Description of Artificial Sequence: Synthetic peptide
  N-term Ac
  MOD_RES (2)..(2): (S)-2-amino-3-(7-(diethylamino)-2-oxo-2H-chromene-3- carboxamido)propanoic acid
  MOD_RES (8)..(8): Cit
  MOD_RES (9)..(9): Alpha-Me S5-pentenyl-alanine olefin amino acid connected by an all-carbon crosslinker comprising one double bond
  MISC_FEATURE (9)..(13): Crosslink between residues
  MOD_RES (13)..(13): Alpha-Me S5-pentenyl-alanine olefin amino acid connected by an all-carbon crosslinker comprising one double bond
  MOD_RES (16)..(16): 2-aminoisobutyric acid
  C-term NH2
RXIAQALXAIGDALNXFYAHH

SEQ ID NO: 1470 - protein, 19 aa, Artificial Sequence
  Description of Artificial Sequence: Synthetic peptide
  N-term Ac
  MOD_RES (5)..(5): Methionine sulfoxide
  MOD_RES (8)..(8): Cit
  MOD_RES (9)..(9): Alpha-Me R8-octenyl-alanine olefin amino acid connected by an all-carbon crosslinker comprising one double bond
  MISC_FEATURE (9)..(16): Crosslink between residues
  MOD_RES (16)..(16): Alpha-Me S5-pentenyl-alanine olefin amino acid connected by an all-carbon crosslinker comprising one double bond
  C-term NH2
IWIAMALXAIGDAFNAYYA

SEQ ID NO: 1471 - protein, 19 aa, Artificial Sequence
  Description of Artificial Sequence: Synthetic peptide
  N-term Ac
  MOD_RES (5)..(5): Methionine sulfone
  MOD_RES (8)..(8): Cit
  MOD_RES (9)..(9): Alpha-Me R8-octenyl-alanine olefin amino acid connected by an all-carbon crosslinker comprising one double bond
  MISC_FEATURE (9)..(16): Crosslink between residues
  MOD_RES (16)..(16): Alpha-Me S5-pentenyl-alanine olefin amino acid connected by an all-carbon crosslinker comprising one double bond
  C-term NH2
IWIAMALXAIGDAFNAYYA

SEQ ID NO: 1472 - protein, 21 aa, Artificial Sequence
  Description of Artificial Sequence: Synthetic peptide
  N-term Ac
  MOD_RES (5)..(5): Methionine sulfoxide
  MOD_RES (9)..(9): Alpha-Me S5-pentenyl-alanine olefin amino acid connected by an all-carbon crosslinker comprising one double bond
  MISC_FEATURE (9)..(13): Crosslink between residues
  MOD_RES (13)..(13): Alpha-Me S5-pentenyl-alanine olefin amino acid connected by an all-carbon crosslinker comprising one double bond
  MOD_RES (16)..(16): 2-aminoisobutyric acid
  C-term NH2
RWIAMALRAIGDALNXFYAHH

SEQ ID NO: 1473 - protein, 21 aa, Artificial Sequence
  Description of Artificial Sequence: Synthetic peptide
  N-term Ac
  MOD_RES (5)..(5): Methionine sulfone
  MOD_RES (9)..(9): Alpha-Me S5-pentenyl-alanine olefin amino acid connected by an all-carbon crosslinker comprising one double bond
  MISC_FEATURE (9)..(13): Crosslink between residues
  MOD_RES (13)..(13): Alpha-Me S5-pentenyl-alanine olefin amino acid connected by an all-carbon crosslinker comprising one double bond
  MOD_RES (16)..(16): 2-aminoisobutyric acid
  C-term NH2
RWIAMALRAIGDALNXFYAHH

SEQ ID NO: 1474 - protein, 21 aa, Artificial Sequence
  Description of Artificial Sequence: Synthetic peptide
  N-term Ac
  MOD_RES (9)..(9): Alpha-Me S5-pentenyl-alanine olefin amino acid connected by an all-carbon crosslinker comprising one double bond
  MISC_FEATURE (9)..(13): Crosslink between residues
  MOD_RES (13)..(13): Alpha-Me S5-pentenyl-alanine olefin amino acid connected by an all-carbon crosslinker comprising one double bond
  MOD_RES (16)..(16): 2-aminoisobutyric acid
  C-term NH2
RWIAQALRAIGNAVNXFYAHH

SEQ ID NO: 1475 - protein, 21 aa, Artificial Sequence
  Description of Artificial Sequence: Synthetic peptide
  N-term Ac
  MOD_RES (9)..(9): Alpha-Me S5-pentenyl-alanine olefin amino acid connected by an all-carbon crosslinker comprising one double bond
  MISC_FEATURE (9)..(13): Crosslink between residues
  MOD_RES (13)..(13): Alpha-Me S5-pentenyl-alanine olefin amino acid connected by an all-carbon crosslinker comprising one double bond
  MOD_RES (16)..(16): 2-aminoisobutyric acid
  C-term NH2
RWIAQAARAIGDAVNXFYAHH

SEQ ID NO: 1476 - protein, 21 aa, Artificial Sequence
  Description of Artificial Sequence: Synthetic peptide
  N-term Ac
  MOD_RES (9)..(9): Alpha-Me S5-pentenyl-alanine olefin amino acid connected by an all-carbon crosslinker comprising one double bond
  MISC_FEATURE (9)..(13): Crosslink between residues
  MOD_RES (13)..(13): Alpha-Me S5-pentenyl-alanine olefin amino acid connected by an all-carbon crosslinker comprising one double bond
  MOD_RES (16)..(16): 2-aminoisobutyric acid
  C-term NH2
RWIAQALAAIGDAVNXFYAHH

SEQ ID NO: 1477 - protein, 21 aa, Artificial Sequence
  Description of Artificial Sequence: Synthetic peptide
  N-term Ac
  MOD_RES (8)..(8): Cit
  MOD_RES (9)..(9): Alpha-Me S5-pentenyl-alanine olefin amino acid connected by an all-carbon crosslinker comprising one double bond
  MISC_FEATURE (9)..(13): Crosslink between residues
  MOD_RES (13)..(13): Alpha-Me S5-pentenyl-alanine olefin amino acid connected by an all-carbon crosslinker comprising one double bond
  MOD_RES (16)..(16): 2-aminoisobutyric acid
  C-term NH2
RWIAQALXAIGDAVNXFYAHH

SEQ ID NO: 1478 - protein, 21 aa, Artificial Sequence
  Description of Artificial Sequence: Synthetic peptide
  N-term Ac
  MOD_RES (2)..(2): (S)-2-amino-3-(7-(diethylamino)-2-oxo-2H-chromene-3- carboxamido)propanoic acid
  MOD_RES (9)..(9): Alpha-Me S5-pentenyl-alanine olefin amino acid connected by an all-carbon crosslinker comprising one double bond
  MISC_FEATURE (9)..(13): Crosslink between residues
  MOD_RES (13)..(13): Alpha-Me S5-pentenyl-alanine olefin amino acid connected by an all-carbon crosslinker comprising one double bond
  MOD_RES (16)..(16): 2-aminoisobutyric acid
  C-term NH2
RXIAQALRAIGDAVNXFYAHH

SEQ ID NO: 1479 - protein, 21 aa, Artificial Sequence
  Description of Artificial Sequence: Synthetic peptide
  N-term Ac
  MOD_RES (2)..(2): (S)-2-amino-3-(7-(diethylamino)-2-oxo-2H-chromene-3- carboxamido)propanoic acid
  MOD_RES (9)..(9): Alpha-Me S5-pentenyl-alanine olefin amino acid connected by an all-carbon crosslinker comprising one double bond
  MISC_FEATURE (9)..(13): Crosslink between residues
  MOD_RES (13)..(13): Alpha-Me S5-pentenyl-alanine olefin amino acid connected by an all-carbon crosslinker comprising one double bond
  MOD_RES (16)..(16): 2-aminoisobutyric acid
  C-term NH2
RXIAQALRAIGNAVNXFYAHH

SEQ ID NO: 1480 - protein, 21 aa, Artificial Sequence
  Description of Artificial Sequence: Synthetic peptide
  N-term Ac
  MOD_RES (2)..(2): (S)-2-amino-3-(7-(diethylamino)-2-oxo-2H-chromene-3- carboxamido)propanoic acid
  MOD_RES (9)..(9): Alpha-Me S5-pentenyl-alanine olefin amino acid connected by an all-carbon crosslinker comprising one double bond
  MISC_FEATURE (9)..(13): Crosslink between residues
  MOD_RES (13)..(13): Alpha-Me S5-pentenyl-alanine olefin amino acid connected by an all-carbon crosslinker comprising one double bond
  MOD_RES (16)..(16): 2-aminoisobutyric acid
  C-term NH2
RXIAQAARAIGDAVNXFYAHH

SEQ ID NO: 1481 - protein, 21 aa, Artificial Sequence
  Description of Artificial Sequence: Synthetic peptide
  N-term Ac
  MOD_RES (2)..(2): (S)-2-amino-3-(7-(diethylamino)-2-oxo-2H-chromene-3- carboxamido)propanoic acid
  MOD_RES (9)..(9): Alpha-Me S5-pentenyl-alanine olefin amino acid connected by an all-carbon crosslinker comprising one double bond
  MISC_FEATURE (9)..(13): Crosslink between residues
  MOD_RES (13)..(13): Alpha-Me S5-pentenyl-alanine olefin amino acid connected by an all-carbon crosslinker comprising one double bond
  MOD_RES (16)..(16): 2-aminoisobutyric acid
  C-term NH2
RXIAQALAAIGDAVNXFYAHH

SEQ ID NO: 1482 - protein, 21 aa, Artificial Sequence
  Description of Artificial Sequence: Synthetic peptide
  N-term Ac
  MOD_RES (2)..(2): (S)-2-amino-3-(7-(diethylamino)-2-oxo-2H-chromene-3- carboxamido)propanoic acid
  MOD_RES (8)..(8): Cit
  MOD_RES (9)..(9): Alpha-Me S5-pentenyl-alanine olefin amino acid connected by an all-carbon crosslinker comprising one double bond
  MISC_FEATURE (9)..(13): Crosslink between residues
  MOD_RES (13)..(13): Alpha-Me S5-pentenyl-alanine olefin amino acid connected by an all-carbon crosslinker comprising one double bond
  MOD_RES (16)..(16): 2-aminoisobutyric acid
  C-term NH2
RXIAQALXAIGDAVNXFYAHH

SEQ ID NO: 1483 - protein, 19 aa, Artificial Sequence
  Description of Artificial Sequence: Synthetic peptide
  N-term Ac
  MOD_RES (3)..(3): Cyclohexyl-Ala
  MOD_RES (9)..(9): Alpha-Me R8-octenyl-alanine olefin amino acid connected by an all-carbon crosslinker comprising one double bond
  MISC_FEATURE (9)..(16): Crosslink between residues
  MOD_RES (16)..(16): Alpha-Me S5-pentenyl-alanine olefin amino acid connected by an all-carbon crosslinker comprising one double bond
  C-term NH2
IWAAQALRAIGDAFNAYYA

SEQ ID NO: 1484 - protein, 19 aa, Artificial Sequence
  Description of Artificial Sequence: Synthetic peptide
  N-term Ac
  MOD_RES (3)..(3): hhLeu
  MOD_RES (9)..(9): Alpha-Me R8-octenyl-alanine olefin amino acid connected by an all-carbon crosslinker comprising one double bond
  MISC_FEATURE (9)..(16): Crosslink between residues
  MOD_RES (16)..(16): Alpha-Me S5-pentenyl-alanine olefin amino acid connected by an all-carbon crosslinker comprising one double bond
  C-term NH2
IWLAQALRAIGDAFNAYYA

SEQ ID NO: 1485 - protein, 19 aa, Artificial Sequence
  Description of Artificial Sequence: Synthetic peptide
  N-term Ac
  MOD_RES (3)..(3): Adamantyl-Gly
  MOD_RES (9)..(9): Alpha-Me R8-octenyl-alanine olefin amino acid connected by an all-carbon crosslinker comprising one double bond
  MISC_FEATURE (9)..(16): Crosslink between residues
  MOD_RES (16)..(16): Alpha-Me S5-pentenyl-alanine olefin amino acid connected by an all-carbon crosslinker comprising one double bond
  C-term NH2
IWGAQALRAIGDAFNAYYA

SEQ ID NO: 1486 - protein, 19 aa, Artificial Sequence
  Description of Artificial Sequence: Synthetic peptide
  N-term Ac
  MOD_RES (3)..(3): homo-Cyclohexyl-Ala
  MOD_RES (9)..(9): Alpha-Me R8-octenyl-alanine olefin amino acid connected by an all-carbon crosslinker comprising one double bond
  MISC_FEATURE (9)..(16): Crosslink between residues
  MOD_RES (16)..(16): Alpha-Me S5-pentenyl-alanine olefin amino acid connected by an all-carbon crosslinker comprising one double bond
  C-term NH2
IWAAQALRAIGDAFNAYYA

SEQ ID NO: 1487 - protein, 19 aa, Artificial Sequence
  Description of Artificial Sequence: Synthetic peptide
  N-term Ac
  MOD_RES (3)..(3): homo-Phe
  MOD_RES (9)..(9): Alpha-Me R8-octenyl-alanine olefin amino acid connected by an all-carbon crosslinker comprising one double bond
  MISC_FEATURE (9)..(16): Crosslink between residues
  MOD_RES (16)..(16): Alpha-Me S5-pentenyl-alanine olefin amino acid connected by an all-carbon crosslinker comprising one double bond
  C-term NH2
IWFAQALRAIGDAFNAYYA

SEQ ID NO: 1488 - protein, 19 aa, Artificial Sequence
  Description of Artificial Sequence: Synthetic peptide
  N-term Ac
  MOD_RES (3)..(3): Indanyl-Gly
  MOD_RES (9)..(9): Alpha-Me R8-octenyl-alanine olefin amino acid connected by an all-carbon crosslinker comprising one double bond
  MISC_FEATURE (9)..(16): Crosslink between residues
  MOD_RES (16)..(16): Alpha-Me S5-pentenyl-alanine olefin amino acid connected by an all-carbon crosslinker comprising one double bond
  C-term NH2
IWGAQALRAIGDAFNAYYA

SEQ ID NO: 1489 - protein, 19 aa, Artificial Sequence
  Description of Artificial Sequence: Synthetic peptide
  N-term Ac
  MOD_RES (3)..(3): Phe-4CF3
  MOD_RES (9)..(9): Alpha-Me R8-octenyl-alanine olefin amino acid connected by an all-carbon crosslinker comprising one double bond
  MISC_FEATURE (9)..(16): Crosslink between residues
  MOD_RES (16)..(16): Alpha-Me S5-pentenyl-alanine olefin amino acid connected by an all-carbon crosslinker comprising one double bond
  C-term NH2
IWFAQALRAIGDAFNAYYA

SEQ ID NO: 1490 - protein, 19 aa, Artificial Sequence
  Description of Artificial Sequence: Synthetic peptide
  N-term Ac
  MOD_RES (3)..(3): Phe-4tBu
  MOD_RES (9)..(9): Alpha-Me R8-octenyl-alanine olefin amino acid connected by an all-carbon crosslinker comprising one double bond
  MISC_FEATURE (9)..(16): Crosslink between residues
  MOD_RES (16)..(16): Alpha-Me S5-pentenyl-alanine olefin amino acid connected by an all-carbon crosslinker comprising one double bond
  C-term NH2
IWFAQALRAIGDAFNAYYA

SEQ ID NO: 1491 - protein, 19 aa, Artificial Sequence
  Description of Artificial Sequence: Synthetic peptide
  N-term Ac
  MOD_RES (3)..(3): 2-Naphthalanine
  MOD_RES (9)..(9): Alpha-Me R8-octenyl-alanine olefin amino acid connected by an all-carbon crosslinker comprising one double bond
  MISC_FEATURE (9)..(16): Crosslink between residues
  MOD_RES (16)..(16): Alpha-Me S5-pentenyl-alanine olefin amino acid connected by an all-carbon crosslinker comprising one double bond
  C-term NH2
IWAAQALRAIGDAFNAYYA

SEQ ID NO: 1492 - protein, 19 aa, Artificial Sequence
  Description of Artificial Sequence: Synthetic peptide
  N-term Ac
  MOD_RES (3)..(3): Bip
  MOD_RES (9)..(9): Alpha-Me R8-octenyl-alanine olefin amino acid connected by an all-carbon crosslinker comprising one double bond
  MISC_FEATURE (9)..(16): Crosslink between residues
  MOD_RES (16)..(16): Alpha-Me S5-pentenyl-alanine olefin amino acid connected by an all-carbon crosslinker comprising one double bond
  C-term NH2
IWXAQALRAIGDAFNAYYA

SEQ ID NO: 1493 - protein, 19 aa, Artificial Sequence
  Description of Artificial Sequence: Synthetic peptide
  N-term Ac
  MOD_RES (7)..(7): Cyclohexyl-Ala
  MOD_RES (9)..(9): Alpha-Me R8-octenyl-alanine olefin amino acid connected by an all-carbon crosslinker comprising one double bond
  MISC_FEATURE (9)..(16): Crosslink between residues
  MOD_RES (16)..(16): Alpha-Me S5-pentenyl-alanine olefin amino acid connected by an all-carbon crosslinker comprising one double bond
  C-term NH2
IWIAQAARAIGDAFNAYYA

SEQ ID NO: 1494 - protein, 19 aa, Artificial Sequence
  Description of Artificial Sequence: Synthetic peptide
  N-term Ac
  MOD_RES (7)..(7): hhLeu
  MOD_RES (9)..(9): Alpha-Me R8-octenyl-alanine olefin amino acid connected by an all-carbon crosslinker comprising one double bond
  MISC_FEATURE (9)..(16): Crosslink between residues
  MOD_RES (16)..(16): Alpha-Me S5-pentenyl-alanine olefin amino acid connected by an all-carbon crosslinker comprising one double bond
  C-term NH2
IWIAQALRAIGDAFNAYYA

SEQ ID NO: 1495 - protein, 19 aa, Artificial Sequence
  Description of Artificial Sequence: Synthetic peptide
  N-term Ac
  MOD_RES (7)..(7): Adamantyl-Gly
  MOD_RES (9)..(9): Alpha-Me R8-octenyl-alanine olefin amino acid connected by an all-carbon crosslinker comprising one double bond
  MISC_FEATURE (9)..(16): Crosslink between residues
  MOD_RES (16)..(16): Alpha-Me S5-pentenyl-alanine olefin amino acid connected by an all-carbon crosslinker comprising one double bond
  C-term NH2
IWIAQAGRAIGDAFNAYYA

SEQ ID NO: 1496 - protein, 19 aa, Artificial Sequence
  Description of Artificial Sequence: Synthetic peptide
  N-term Ac
  MOD_RES (7)..(7): homo-Cyclohexyl-Ala
  MOD_RES (9)..(9): Alpha-Me R8-octenyl-alanine olefin amino acid connected by an all-carbon crosslinker comprising one double bond
  MISC_FEATURE (9)..(16): Crosslink between residues
  MOD_RES (16)..(16): Alpha-Me S5-pentenyl-alanine olefin amino acid connected by an all-carbon crosslinker comprising one double bond
  C-term NH2
IWIAQAARAIGDAFNAYYA

SEQ ID NO: 1497 - protein, 19 aa, Artificial Sequence
  Description of Artificial Sequence: Synthetic peptide
  N-term Ac
  MOD_RES (7)..(7): Homo-Adamantyl glycine
  MOD_RES (9)..(9): Alpha-Me R8-octenyl-alanine olefin amino acid connected by an all-carbon crosslinker comprising one double bond
  MISC_FEATURE (9)..(16): Crosslink between residues
  MOD_RES (16)..(16): Alpha-Me S5-pentenyl-alanine olefin amino acid connected by an all-carbon crosslinker comprising one double bond
  C-term NH2
IWIAQAGRAIGDAFNAYYA

SEQ ID NO: 1498 - protein, 19 aa, Artificial Sequence
  Description of Artificial Sequence: Synthetic peptide
  N-term Ac
  MOD_RES (7)..(7): homo-Phe
  MOD_RES (9)..(9): Alpha-Me R8-octenyl-alanine olefin amino acid connected by an all-carbon crosslinker comprising one double bond
  MISC_FEATURE (9)..(16): Crosslink between residues
  MOD_RES (16)..(16): Alpha-Me S5-pentenyl-alanine olefin amino acid connected by an all-carbon crosslinker comprising one double bond
  C-term NH2
IWIAQAFRAIGDAFNAYYA

SEQ ID NO: 1499 - protein, 19 aa, Artificial Sequence
  Description of Artificial Sequence: Synthetic peptide
  N-term Ac
  MOD_RES (7)..(7): Indanyl-Gly
  MOD_RES (9)..(9): Alpha-Me R8-octenyl-alanine olefin amino acid connected by an all-carbon crosslinker comprising one double bond
  MISC_FEATURE (9)..(16): Crosslink between residues
  MOD_RES (16)..(16): Alpha-Me S5-pentenyl-alanine olefin amino acid connected by an all-carbon crosslinker comprising one double bond
  C-term NH2
IWIAQAGRAIGDAFNAYYA

SEQ ID NO: 1500 - protein, 19 aa, Artificial Sequence
  Description of Artificial Sequence: Synthetic peptide
  N-term Ac
  MOD_RES (7)..(7): Phe-4CF3
  MOD_RES (9)..(9): Alpha-Me R8-octenyl-alanine olefin amino acid connected by an all-carbon crosslinker comprising one double bond
  MISC_FEATURE (9)..(16): Crosslink between residues
  MOD_RES (16)..(16): Alpha-Me S5-pentenyl-alanine olefin amino acid connected by an all-carbon crosslinker comprising one double bond
  C-term NH2
IWIAQAFRAIGDAFNAYYA

SEQ ID NO: 1501 - protein, 19 aa, Artificial Sequence
  Description of Artificial Sequence: Synthetic peptide
  N-term Ac
  MOD_RES (7)..(7): Phe-4tBu
  MOD_RES (9)..(9): Alpha-Me R8-octenyl-alanine olefin amino acid connected by an all-carbon crosslinker comprising one double bond
  MISC_FEATURE (9)..(16): Crosslink between residues
  MOD_RES (16)..(16): Alpha-Me S5-pentenyl-alanine olefin amino acid connected by an all-carbon crosslinker comprising one double bond
  C-term NH2
IWIAQAFRAIGDAFNAYYA

SEQ ID NO: 1502 - protein, 19 aa, Artificial Sequence
  Description of Artificial Sequence: Synthetic peptide
  N-term Ac
  MOD_RES (7)..(7): 2-Naphthalanine
  MOD_RES (9)..(9): Alpha-Me R8-octenyl-alanine olefin amino acid connected by an all-carbon crosslinker comprising one double bond
  MISC_FEATURE (9)..(16): Crosslink between residues
  MOD_RES (16)..(16): Alpha-Me S5-pentenyl-alanine olefin amino acid connected by an all-carbon crosslinker comprising one double bond
  C-term NH2
IWIAQAARAIGDAFNAYYA

SEQ ID NO: 1503 - protein, 19 aa, Artificial Sequence
  Description of Artificial Sequence: Synthetic peptide
  N-term Ac
  MOD_RES (7)..(7): Bip
  MOD_RES (9)..(9): Alpha-Me R8-octenyl-alanine olefin amino acid connected by an all-carbon crosslinker comprising one double bond
  MISC_FEATURE (9)..(16): Crosslink between residues
  MOD_RES (16)..(16): Alpha-Me S5-pentenyl-alanine olefin amino acid connected by an all-carbon crosslinker comprising one double bond
  C-term NH2
IWIAQAXRAIGDAFNAYYA

SEQ ID NO: 1504 - protein, 19 aa, Artificial Sequence
  Description of Artificial Sequence: Synthetic peptide
  N-term Ac
  MOD_RES (9)..(9): Alpha-Me R8-octenyl-alanine olefin amino acid connected by an all-carbon crosslinker comprising one double bond
  MISC_FEATURE (9)..(16): Crosslink between residues
  MOD_RES (10)..(10): Cyclobutyl alanine
  MOD_RES (16)..(16): Alpha-Me S5-pentenyl-alanine olefin amino acid connected by an all-carbon crosslinker comprising one double bond
  C-term NH2
IWIAQALRAAGDAFNAYYA

SEQ ID NO: 1505 - protein, 19 aa, Artificial Sequence
  Description of Artificial Sequence: Synthetic peptide
  N-term Ac
  MOD_RES (9)..(9): Alpha-Me R8-octenyl-alanine olefin amino acid connected by an all-carbon crosslinker comprising one double bond
  MISC_FEATURE (9)..(16): Crosslink between residues
  MOD_RES (10)..(10): hLeu
  MOD_RES (16)..(16): Alpha-Me S5-pentenyl-alanine olefin amino acid connected by an all-carbon crosslinker comprising one double bond
  C-term NH2
IWIAQALRALGDAFNAYYA

SEQ ID NO: 1506 - protein, 19 aa, Artificial Sequence
  Description of Artificial Sequence: Synthetic peptide
  N-term Ac
  MOD_RES (9)..(9): Alpha-Me R8-octenyl-alanine olefin amino acid connected by an all-carbon crosslinker comprising one double bond
  MISC_FEATURE (9)..(16): Crosslink between residues
  MOD_RES (10)..(10): Cyclohexyl-Ala
  MOD_RES (16)..(16): Alpha-Me S5-pentenyl-alanine olefin amino acid connected by an all-carbon crosslinker comprising one double bond
  C-term NH2
IWIAQALRAAGDAFNAYYA

SEQ ID NO: 1507 - protein, 19 aa, Artificial Sequence
  Description of Artificial Sequence: Synthetic peptide
  N-term Ac
  MOD_RES (9)..(9): Alpha-Me R8-octenyl-alanine olefin amino acid connected by an all-carbon crosslinker comprising one double bond
  MISC_FEATURE (9)..(16): Crosslink between residues
  MOD_RES (10)..(10): Tert-Butyl-alanine
  MOD_RES (16)..(16): Alpha-Me S5-pentenyl-alanine olefin amino acid connected by an all-carbon crosslinker comprising one double bond
  C-term NH2
IWIAQALRAAGDAFNAYYA

SEQ ID NO: 1508 - protein, 19 aa, Artificial Sequence
  Description of Artificial Sequence: Synthetic peptide
  N-term Ac
  MOD_RES (9)..(9): Alpha-Me R8-octenyl-alanine olefin amino acid connected by an all-carbon crosslinker comprising one double bond
  MISC_FEATURE (9)..(16): Crosslink between residues
  MOD_RES (10)..(10): hhLeu
  MOD_RES (16)..(16): Alpha-Me S5-pentenyl-alanine olefin amino acid connected by an all-carbon crosslinker comprising one double bond
  C-term NH2
IWIAQALRALGDAFNAYYA

SEQ ID NO: 1509 - protein, 19 aa, Artificial Sequence
  Description of Artificial Sequence: Synthetic peptide
  N-term Ac
  MOD_RES (2)..(2): Alpha-Me-Trp
  MOD_RES (9)..(9): Alpha-Me R8-octenyl-alanine olefin amino acid connected by an all-carbon crosslinker comprising one double bond
  MISC_FEATURE (9)..(16): Crosslink between residues
  MOD_RES (16)..(16): Alpha-Me S5-pentenyl-alanine olefin amino acid connected by an all-carbon crosslinker comprising one double bond
  C-term NH2
IWIAQALRAIGDAFNAYYA

SEQ ID NO: 1510 - protein, 19 aa, Artificial Sequence
  Description of Artificial Sequence: Synthetic peptide
  N-term Ac
  MOD_RES (2)..(2): 2-aminoisobutyric acid
  MOD_RES (9)..(9): Alpha-Me R8-octenyl-alanine olefin amino acid connected by an all-carbon crosslinker comprising one double bond
  MISC_FEATURE (9)..(16): Crosslink between residues
  MOD_RES (16)..(16): Alpha-Me S5-pentenyl-alanine olefin amino acid connected by an all-carbon crosslinker comprising one double bond
  C-term NH2
IXIAQALRAIGDAFNAYYA

SEQ ID NO: 1511 - protein, 19 aa, Artificial Sequence
  Description of Artificial Sequence: Synthetic peptide
  N-term Ac
  MOD_RES (1)..(1): Alpha-Me-Leu
  MOD_RES (9)..(9): Alpha-Me R8-octenyl-alanine olefin amino acid connected by an all-carbon crosslinker comprising one double bond
  MISC_FEATURE (9)..(16): Crosslink between residues
  MOD_RES (16)..(16): Alpha-Me S5-pentenyl-alanine olefin amino acid connected by an all-carbon crosslinker comprising one double bond
  C-term NH2
LWIAQALRAIGDAFNAYYA

SEQ ID NO: 1512 - protein, 19 aa, Artificial Sequence
  Description of Artificial Sequence: Synthetic peptide
  N-term Ac
  MOD_RES (3)..(3): Alpha-Me-Leu
  MOD_RES (9)..(9): Alpha-Me R8-octenyl-alanine olefin amino acid connected by an all-carbon crosslinker comprising one double bond
  MISC_FEATURE (9)..(16): Crosslink between residues
  MOD_RES (16)..(16): Alpha-Me S5-pentenyl-alanine olefin amino acid connected by an all-carbon crosslinker comprising one double bond
  C-term NH2
IWLAQALRAIGDAFNAYYA

SEQ ID NO: 1513 - protein, 19 aa, Artificial Sequence
  Description of Artificial Sequence: Synthetic peptide
  N-term Ac
  MOD_RES (4)..(4): 2-aminoisobutyric acid
  MOD_RES (9)..(9): Alpha-Me R8-octenyl-alanine olefin amino acid connected by an all-carbon crosslinker comprising one double bond
  MISC_FEATURE (9)..(16): Crosslink between residues
  MOD_RES (12)..(12): Alpha-Me-Asp
  MOD_RES (16)..(16): Alpha-Me S5-pentenyl-alanine olefin amino acid connected by an all-carbon crosslinker comprising one double bond
  C-term NH2
IWIXQALRAIGDAFNAYYA

SEQ ID NO: 1514 - protein, 19 aa, Artificial Sequence
  Description of Artificial Sequence: Synthetic peptide
  N-term Ac
  MOD_RES (5)..(5): 2-aminoisobutyric acid
  MOD_RES (9)..(9): Alpha-Me R8-octenyl-alanine olefin amino acid connected by an all-carbon crosslinker comprising one double bond
  MISC_FEATURE (9)..(16): Crosslink between residues
  MOD_RES (16)..(16): Alpha-Me S5-pentenyl-alanine olefin amino acid connected by an all-carbon crosslinker comprising one double bond
  C-term NH2
IWIAXALRAIGDAFNAYYA

SEQ ID NO: 1515 - protein, 19 aa, Artificial Sequence
  Description of Artificial Sequence: Synthetic peptide
  N-term Ac
  MOD_RES (7)..(7): Alpha-Me-Leu
  MOD_RES (9)..(9): Alpha-Me R8-octenyl-alanine olefin amino acid connected by an all-carbon crosslinker comprising one double bond
  MISC_FEATURE (9)..(16): Crosslink between residues
  MOD_RES (16)..(16): Alpha-Me S5-pentenyl-alanine olefin amino acid connected by an all-carbon crosslinker comprising one double bond
  C-term NH2
IWIAQALRAIGDAFNAYYA

SEQ ID NO: 1516 - protein, 19 aa, Artificial Sequence
  Description of Artificial Sequence: Synthetic peptide
  N-term Ac
  MOD_RES (9)..(9): Alpha-Me R8-octenyl-alanine olefin amino acid connected by an all-carbon crosslinker comprising one double bond
  MISC_FEATURE (9)..(16): Crosslink between residues
  MOD_RES (12)..(12): Alpha-Me-Asp
  MOD_RES (16)..(16): Alpha-Me S5-pentenyl-alanine olefin amino acid connected by an all-carbon crosslinker comprising one double bond
  C-term NH2
IWIAQALRAIGDAFNAYYA

SEQ ID NO: 1517 - protein, 19 aa, Artificial Sequence
  Description of Artificial Sequence: Synthetic peptide
  N-term Ac
  MOD_RES (9)..(9): Alpha-Me R8-octenyl-alanine olefin amino acid connected by an all-carbon crosslinker comprising one double bond
  MISC_FEATURE (9)..(16): Crosslink between residues
  MOD_RES (16)..(16): Alpha-Me S5-pentenyl-alanine olefin amino acid connected by an all-carbon crosslinker comprising one double bond
  MOD_RES (17)..(17): Phe-4F
  C-term NH2
IWIAQALRAIGDAFNAFYA

SEQ ID NO: 1518 - protein, 19 aa, Artificial Sequence
  Description of Artificial Sequence: Synthetic peptide
  N-term Ac
  MOD_RES (9)..(9): Alpha-Me R8-octenyl-alanine olefin amino acid connected by an all-carbon crosslinker comprising one double bond
  MISC_FEATURE (9)..(16): Crosslink between residues
  MOD_RES (16)..(16): Alpha-Me S5-pentenyl-alanine olefin amino acid connected by an all-carbon crosslinker comprising one double bond
  C-term NH2
IWIAQALRAIGDAFNAAYA

SEQ ID NO: 1519 - protein, 19 aa, Artificial Sequence
  Description of Artificial Sequence: Synthetic peptide
  N-term Ac
  MOD_RES (9)..(9): Alpha-Me R8-octenyl-alanine olefin amino acid connected by an all-carbon crosslinker comprising one double bond
  MISC_FEATURE (9)..(16): Crosslink between residues
  MOD_RES (16)..(16): Alpha-Me S5-pentenyl-alanine olefin amino acid connected by an all-carbon crosslinker comprising one double bond
  MOD_RES (18)..(18): Phe-4F
  C-term NH2
IWIAQALRAIGDAFNAYFA

SEQ ID NO: 1520 - protein, 19 aa, Artificial Sequence
  Description of Artificial Sequence: Synthetic peptide
  N-term Ac
  MOD_RES (9)..(9): Alpha-Me R8-octenyl-alanine olefin amino acid connected by an all-carbon crosslinker comprising one double bond
  MISC_FEATURE (9)..(16): Crosslink between residues
  MOD_RES (16)..(16): Alpha-Me S5-pentenyl-alanine olefin amino acid connected by an all-carbon crosslinker comprising one double bond
  MOD_RES (19)..(19): 2-aminoisobutyric acid
  C-term NH2
IWIAQALRAIGDAFNAYYX

SEQ ID NO: 1521 - protein, 19 aa, Artificial Sequence
  Description of Artificial Sequence: Synthetic peptide
  N-term Ac
  MOD_RES (2)..(2): Alpha-Me R8-octenyl-alanine olefin amino acid connected by an all-carbon crosslinker comprising one double bond
  MISC_FEATURE (2)..(9): Crosslink between residues
  MOD_RES (9)..(9): Two pentenyl-alanine olefin side chains, each of which is crosslinked to another amino acid as indicated
  MISC_FEATURE (9)..(16): Crosslink between residues
  MOD_RES (16)..(16): Alpha-Me S8-octenyl-alanine olefin amino acid connected by an all-carbon crosslinker comprising one double bond
  C-term NH2
IAIAQALRAIGDEFNAYYA

SEQ ID NO: 1522 - protein, 19 aa, Artificial Sequence
  Description of Artificial Sequence: Synthetic peptide
  N-term Ac
  MOD_RES (5)..(5): Alpha-Me S5-pentenyl-alanine olefin amino acid connected by an all-carbon crosslinker comprising one double bond
  MISC_FEATURE (5)..(9): Crosslink between residues
  MOD_RES (9)..(9): Two pentenyl-alanine olefin side chains, each of which is crosslinked to another amino acid as indicated
  MISC_FEATURE (9)..(16): Crosslink between residues
  MOD_RES (16)..(16): Alpha-Me S8-octenyl-alanine olefin amino acid connected by an all-carbon crosslinker comprising one double bond
  C-term NH2
IWIAAALRAIGDEFNAYYA

SEQ ID NO: 1523 - protein, 21 aa, Artificial Sequence
  Description of Artificial Sequence: Synthetic peptide
  N-term Ac
  MOD_RES (9)..(9): Alpha-Me R8-octenyl-alanine olefin amino acid connected by an all-carbon crosslinker comprising one double bond
  MISC_FEATURE (9)..(16): Crosslink between residues
  MOD_RES (16)..(16): Two pentenyl-alanine olefin side chains, each of which is crosslinked to another amino acid as indicated
  MISC_FEATURE (16)..(20): Crosslink between residues
  MOD_RES (20)..(20): Alpha-Me R5-pentenyl-alanine olefin amino acid connected by an all-carbon crosslinker comprising one double bond
  C-term NH2
IWIAQALRAIGDEFNAYYAAA

SEQ ID NO: 1524 - protein, 19 aa, Artificial Sequence
  Description of Artificial Sequence: Synthetic peptide
  N-term Ac
  MOD_RES (8)..(8): Cit
  MOD_RES (9)..(9): Alpha-Me R8-octenyl-alanine olefin amino acid connected by an all-carbon crosslinker comprising one double bond
  MISC_FEATURE (9)..(16): Crosslink between residues
  MOD_RES (16)..(16): Alpha-Me S5-pentenyl-alanine olefin amino acid connected by an all-carbon crosslinker comprising one double bond
  C-term NH2
IWIAQAAXAIGDAFNAYYA

SEQ ID NO: 1525 - protein, 19 aa, Artificial Sequence
  Description of Artificial Sequence: Synthetic peptide
  N-term Ac
  MOD_RES (8)..(8): Cit
  MOD_RES (9)..(9): Alpha-Me R8-octenyl-alanine olefin amino acid connected by an all-carbon crosslinker comprising one double bond
  MISC_FEATURE (9)..(16): Crosslink between residues
  MOD_RES (16)..(16): Alpha-Me S5-pentenyl-alanine olefin amino acid connected by an all-carbon crosslinker comprising one double bond
  C-term NH2
IWIAQALXAIGNAFNAYYA

SEQ ID NO: 1526 - protein, 19 aa, Artificial Sequence
  Description of Artificial Sequence: Synthetic peptide
  N-term Ac
  MOD_RES (8)..(8): Cit
  MOD_RES (9)..(9): Alpha-Me R8-octenyl-alanine olefin amino acid connected by an all-carbon crosslinker comprising one double bond
  MISC_FEATURE (9)..(16): Crosslink between residues
  MOD_RES (16)..(16): Alpha-Me S5-pentenyl-alanine olefin amino acid connected by an all-carbon crosslinker comprising one double bond
  C-term NH2
IWIAQALXAIGDAANAYYA

SEQ ID NO: 1527 - protein, 19 aa, Artificial Sequence
  Description of Artificial Sequence: Synthetic peptide
  N-term Ac
  MOD_RES (8)..(8): Cit
  MOD_RES (9)..(9): Alpha-Me R8-octenyl-alanine olefin amino acid connected by an all-carbon crosslinker comprising one double bond
  MISC_FEATURE (9)..(16): Crosslink between residues
  MOD_RES (16)..(16): Alpha-Me S5-pentenyl-alanine olefin amino acid connected by an all-carbon crosslinker comprising one double bond
  C-term NH2
IWIAQALXAIGDAVNAYYA

SEQ ID NO: 1528 - protein, 21 aa, Artificial Sequence
  Description of Artificial Sequence: Synthetic peptide
  N-term Ac
  MOD_RES (7)..(7): Cyclohexyl-Ala
  MOD_RES (9)..(9): Alpha-Me S5-pentenyl-alanine olefin amino acid connected by an all-carbon crosslinker comprising one double bond
  MISC_FEATURE (9)..(13): Crosslink between residues
  MOD_RES (13)..(13): Alpha-Me S5-pentenyl-alanine olefin amino acid connected by an all-carbon crosslinker comprising one double bond
  MOD_RES (16)..(16): 2-aminoisobutyric acid
  C-term NH2
RWIAQAARAIGDALNXFYAHH

SEQ ID NO: 1529 - protein, 21 aa, Artificial Sequence
  Description of Artificial Sequence: Synthetic peptide
  N-term Ac
  MOD_RES (7)..(7): hhLeu
  MOD_RES (9)..(9): Alpha-Me S5-pentenyl-alanine olefin amino acid connected by an all-carbon crosslinker comprising one double bond
  MISC_FEATURE (9)..(13): Crosslink between residues
  MOD_RES (13)..(13): Alpha-Me S5-pentenyl-alanine olefin amino acid connected by an all-carbon crosslinker comprising one double bond
  MOD_RES (16)..(16): 2-aminoisobutyric acid
  C-term NH2
RWIAQALRAIGDALNXFYAHH

SEQ ID NO: 1530 - protein, 21 aa, Artificial Sequence
  Description of Artificial Sequence: Synthetic peptide
  N-term Ac
  MOD_RES (7)..(7): Adamantyl-Gly
  MOD_RES (9)..(9): Alpha-Me S5-pentenyl-alanine olefin amino acid connected by an all-carbon crosslinker comprising one double bond
  MISC_FEATURE (9)..(13): Crosslink between residues
  MOD_RES (13)..(13): Alpha-Me S5-pentenyl-alanine olefin amino acid connected by an all-carbon crosslinker comprising one double bond
  MOD_RES (16)..(16): 2-aminoisobutyric acid
  C-term NH2
RWIAQAGRAIGDALNXFYAHH

SEQ ID NO: 1531 - protein, 21 aa, Artificial Sequence
  Description of Artificial Sequence: Synthetic peptide
  N-term Ac
  MOD_RES (7)..(7): homo-Cyclohexyl-Ala
  MOD_RES (9)..(9): Alpha-Me S5-pentenyl-alanine olefin amino acid connected by an all-carbon crosslinker comprising one double bond
  MISC_FEATURE (9)..(13): Crosslink between residues
  MOD_RES (13)..(13): Alpha-Me S5-pentenyl-alanine olefin amino acid connected by an all-carbon crosslinker comprising one double bond
  MOD_RES (16)..(16): 2-aminoisobutyric acid
  C-term NH2
RWIAQAARAIGDALNXFYAHH

SEQ ID NO: 1532 - protein, 21 aa, Artificial Sequence
  Description of Artificial Sequence: Synthetic peptide
  N-term Ac
  MOD_RES (7)..(7): homo-Phe
  MOD_RES (9)..(9): Alpha-Me S5-pentenyl-alanine olefin amino acid connected by an all-carbon crosslinker comprising one double bond
  MISC_FEATURE (9)..(13): Crosslink between residues
  MOD_RES (13)..(13): Alpha-Me S5-pentenyl-alanine olefin amino acid connected by an all-carbon crosslinker comprising one double bond
  MOD_RES (16)..(16): 2-aminoisobutyric acid
  C-term NH2
RWIAQAFRAIGDALNXFYAHH

SEQ ID NO: 1533 - protein, 21 aa, Artificial Sequence
  Description of Artificial Sequence: Synthetic peptide
  N-term Ac
  MOD_RES (7)..(7): Indanyl-Gly
  MOD_RES (9)..(9): Alpha-Me S5-pentenyl-alanine olefin amino acid connected by an all-carbon crosslinker comprising one double bond
  MISC_FEATURE (9)..(13): Crosslink between residues
  MOD_RES (13)..(13): Alpha-Me S5-pentenyl-alanine olefin amino acid connected by an all-carbon crosslinker comprising one double bond
  MOD_RES (16)..(16): 2-aminoisobutyric acid
  C-term NH2
RWIAQAGRAIGDALNXFYAHH

SEQ ID NO: 1534 - protein, 21 aa, Artificial Sequence
  Description of Artificial Sequence: Synthetic peptide
  N-term Ac
  MOD_RES (7)..(7): Phe-4CF3
  MOD_RES (9)..(9): Alpha-Me S5-pentenyl-alanine olefin amino acid connected by an all-carbon crosslinker comprising one double bond
  MISC_FEATURE (9)..(13): Crosslink between residues
  MOD_RES (13)..(13): Alpha-Me S5-pentenyl-alanine olefin amino acid connected by an all-carbon crosslinker comprising one double bond
  MOD_RES (16)..(16): 2-aminoisobutyric acid
  C-term NH2
RWIAQAFRAIGDALNXFYAHH

SEQ ID NO: 1535 - protein, 21 aa, Artificial Sequence
  Description of Artificial Sequence: Synthetic peptide
  N-term Ac
  MOD_RES (7)..(7): Phe-4tBu
  MOD_RES (9)..(9): Alpha-Me S5-pentenyl-alanine olefin amino acid connected by an all-carbon crosslinker comprising one double bond
  MISC_FEATURE (9)..(13): Crosslink between residues
  MOD_RES (13)..(13): Alpha-Me S5-pentenyl-alanine olefin amino acid connected by an all-carbon crosslinker comprising one double bond
  MOD_RES (16)..(16): 2-aminoisobutyric acid
  C-term NH2
RWIAQAFRAIGDALNXFYAHH

SEQ ID NO: 1536 - protein, 21 aa, Artificial Sequence
  Description of Artificial Sequence: Synthetic peptide
  N-term Ac
  MOD_RES (7)..(7): 2-Naphthalanine
  MOD_RES (9)..(9): Alpha-Me S5-pentenyl-alanine olefin amino acid connected by an all-carbon crosslinker comprising one double bond
  MISC_FEATURE (9)..(13): Crosslink between residues
  MOD_RES (13)..(13): Alpha-Me S5-pentenyl-alanine olefin amino acid connected by an all-carbon crosslinker comprising one double bond
  MOD_RES (16)..(16): 2-aminoisobutyric acid
  C-term NH2
RWIAQAARAIGDALNXFYAHH

SEQ ID NO: 1537 - protein, 21 aa, Artificial Sequence
  Description of Artificial Sequence: Synthetic peptide
  N-term Ac
  MOD_RES (7)..(7): Bip
  MOD_RES (9)..(9): Alpha-Me S5-pentenyl-alanine olefin amino acid connected by an all-carbon crosslinker comprising one double bond
  MISC_FEATURE (9)..(13): Crosslink between residues
  MOD_RES (13)..(13): Alpha-Me S5-pentenyl-alanine olefin amino acid connected by an all-carbon crosslinker comprising one double bond
  MOD_RES (16)..(16): 2-aminoisobutyric acid
  C-term NH2
RWIAQAXRAIGDALNXFYAHH

SEQ ID NO: 1538 - protein, 19 aa, Artificial Sequence
  Description of Artificial Sequence: Synthetic peptide
  N-term Ac
  MOD_RES (6)..(6): Alpha-Me R8-octenyl-alanine olefin amino acid connected by an all-carbon crosslinker comprising one double bond
  MISC_FEATURE (6)..(13): Crosslink between residues
  MOD_RES (13)..(13): Alpha-Me S5-pentenyl-alanine olefin amino acid connected by an all-carbon crosslinker comprising one double bond
  C-term NH2
IWIAQALRRIGDAFNAYYA

SEQ ID NO: 1539 - protein, 19 aa, Artificial Sequence
  Description of Artificial Sequence: Synthetic peptide
  N-term Ac
  MOD_RES (6)..(6): Alpha-Me R8-octenyl-alanine olefin amino acid connected by an all-carbon crosslinker comprising one double bond
  MISC_FEATURE (6)..(13): Crosslink between residues
  MOD_RES (13)..(13): Alpha-Me S5-pentenyl-alanine olefin amino acid connected by an all-carbon crosslinker comprising one double bond
  C-term NH2
IWIAQALRAIGDAFNAYYA

SEQ ID NO: 1540 - protein, 19 aa, Artificial Sequence
  Description of Artificial Sequence: Synthetic peptide
  N-term Ac
  MOD_RES (6)..(6): Alpha-Me R8-octenyl-alanine olefin amino acid connected by an all-carbon crosslinker comprising one double bond
  MISC_FEATURE (6)..(13): Crosslink between residues
  MOD_RES (8)..(8): Cit
  MOD_RES (13)..(13): Alpha-Me S5-pentenyl-alanine olefin amino acid connected by an all-carbon crosslinker comprising one double bond
  C-term NH2
IWIAQALXRIGDAFNAYYA

SEQ ID NO: 1541 - protein, 19 aa, Artificial Sequence
  Description of Artificial Sequence: Synthetic peptide
  N-term Ac
  MOD_RES (6)..(6): Alpha-Me R8-octenyl-alanine olefin amino acid connected by an all-carbon crosslinker comprising one double bond
  MISC_FEATURE (6)..(13): Crosslink between residues
  MOD_RES (8)..(8): Cit
  MOD_RES (13)..(13): Alpha-Me S5-pentenyl-alanine olefin amino acid connected by an all-carbon crosslinker comprising one double bond
  C-term NH2
IWIAQALXAIGDAFNAYYA

SEQ ID NO: 1542 - protein, 19 aa, Artificial Sequence
  Description of Artificial Sequence: Synthetic peptide
  N-term Ac
  MOD_RES (5)..(5): Methionine sulfoxide
  MOD_RES (8)..(8): Cit
  MOD_RES (9)..(9): Alpha-Me R8-octenyl-alanine olefin amino acid connected by an all-carbon crosslinker comprising one double bond
  MISC_FEATURE (9)..(16): Crosslink between residues
  MOD_RES (16)..(16): Alpha-Me S5-pentenyl-alanine olefin amino acid connected by an all-carbon crosslinker comprising one double bond
  C-term NH2
IWIAMALXAIGDAFNAYYA

SEQ ID NO: 1543 - protein, 19 aa, Artificial Sequence
  Description of Artificial Sequence: Synthetic peptide
  N-term Ac
  MOD_RES (5)..(5): Methionine sulfone
  MOD_RES (8)..(8): Cit
  MOD_RES (9)..(9): Alpha-Me R8-octenyl-alanine olefin amino acid connected by an all-carbon crosslinker comprising one double bond
  MISC_FEATURE (9)..(16): Crosslink between residues
  MOD_RES (16)..(16): Alpha-Me S5-pentenyl-alanine olefin amino acid connected by an all-carbon crosslinker comprising one double bond
  C-term NH2
IWIAMALXAIGDAFNAYYA

SEQ ID NO: 1544 - protein, 19 aa, Artificial Sequence
  Description of Artificial Sequence: Synthetic peptide
  N-term Ac
  MOD_RES (9)..(9): Alpha-Me R8-octenyl-alanine olefin amino acid connected by an all-carbon crosslinker comprising one double bond
  MISC_FEATURE (9)..(16): Crosslink between residues
  MOD_RES (16)..(16): Alpha-Me S5-pentenyl-alanine olefin amino acid connected by an all-carbon crosslinker comprising one double bond
  C-term NH2
IWIAQALDAIGRAFNAYYA

SEQ ID NO: 1545 - protein, 21 aa, Artificial Sequence
  Description of Artificial Sequence: Synthetic peptide
  N-term Ac
  MOD_RES (9)..(9): Alpha-Me S5-pentenyl-alanine olefin amino acid connected by an all-carbon crosslinker comprising one double bond
  MISC_FEATURE (9)..(13): Crosslink between residues
  MOD_RES (13)..(13): Alpha-Me S5-pentenyl-alanine olefin amino acid connected by an all-carbon crosslinker comprising one double bond
  MOD_RES (16)..(16): 2-aminoisobutyric acid
  C-term NH2
RWIAQALDAIGRALNXFYAHH

SEQ ID NO: 1546 - protein, 23 aa, Artificial Sequence
  Description of Artificial Sequence: Synthetic peptide
  N-term Ac
  MOD_RES (12)..(12): Alpha-Me R8-octenyl-alanine olefin amino acid connected by an all-carbon crosslinker comprising one double bond
  MISC_FEATURE (12)..(19): Crosslink between residues
  MOD_RES (19)..(19): Alpha-Me S5-pentenyl-alanine olefin amino acid connected by an all-carbon crosslinker comprising one double bond
  C-term NH2
RPEIWIAQAIDAIGDAVNAYYAR

SEQ ID NO: 1547 - protein, 23 aa, Artificial Sequence
  Description of Artificial Sequence: Synthetic peptide
  N-term Ac
  MOD_RES (12)..(12): Alpha-Me S5-pentenyl-alanine olefin amino acid connected by an all-carbon crosslinker comprising one double bond
  MISC_FEATURE (12)..(16): Crosslink between residues
  MOD_RES (16)..(16): Alpha-Me S5-pentenyl-alanine olefin amino acid connected by an all-carbon crosslinker comprising one double bond
  C-term NH2
RPEIWIAQAIDAIGDAVNAYYAR

SEQ ID NO: 1548 - protein, 19 aa, Artificial Sequence
  Description of Artificial Sequence: Synthetic peptide
  N-term Ac
  MOD_RES (9)..(9): Alpha-Me R8-octenyl-alanine olefin amino acid connected by an all-carbon crosslinker comprising one double bond
  MISC_FEATURE (9)..(16): Crosslink between residues
  MOD_RES (16)..(16): Alpha-Me S5-pentenyl-alanine olefin amino acid connected by an all-carbon crosslinker comprising one double bond
  C-term NH2
DWIAQALRAIGDAFNAYYR

SEQ ID NO: 1549 - protein, 19 aa, Artificial Sequence
  Description of Artificial Sequence: Synthetic peptide
  N-term Ac
  MOD_RES (9)..(9): Alpha-Me R8-octenyl-alanine olefin amino acid connected by an all-carbon crosslinker comprising one double bond
  MISC_FEATURE (9)..(16): Crosslink between residues
  MOD_RES (16)..(16): Alpha-Me S5-pentenyl-alanine olefin amino acid connected by an all-carbon crosslinker comprising one double bond
  C-term NH2
IWAAQALRAIGDAFNAYYA

SEQ ID NO: 1550 - protein, 19 aa, Artificial Sequence
  Description of Artificial Sequence: Synthetic peptide
  N-term Ac
  MOD_RES (3)..(3): Tert-Butyl-alanine
  MOD_RES (9)..(9): Alpha-Me R8-octenyl-alanine olefin amino acid connected by an all-carbon crosslinker comprising one double bond
  MISC_FEATURE (9)..(16): Crosslink between residues
  MOD_RES (16)..(16): Alpha-Me S5-pentenyl-alanine olefin amino acid connected by an all-carbon crosslinker comprising one double bond
  C-term NH2
IWAAQALRAIGDAFNAYYA

SEQ ID NO: 1551 - protein, 19 aa, Artificial Sequence
  Description of Artificial Sequence: Synthetic peptide
  N-term Ac
  MOD_RES (3)..(3): hLeu
  MOD_RES (9)..(9): Alpha-Me R8-octenyl-alanine olefin amino acid connected by an all-carbon crosslinker comprising one double bond
  MISC_FEATURE (9)..(16): Crosslink between residues
  MOD_RES (16)..(16): Alpha-Me S5-pentenyl-alanine olefin amino acid connected by an all-carbon crosslinker comprising one double bond
  C-term NH2
IWLAQALRAIGDAFNAYYA

SEQ ID NO: 1552 - protein, 19 aa, Artificial Sequence
  Description of Artificial Sequence: Synthetic peptide
  N-term Ac
  MOD_RES (3)..(3): Cyclohexyl-Gly
  MOD_RES (9)..(9): Alpha-Me R8-octenyl-alanine olefin amino acid connected by an all-carbon crosslinker comprising one double bond
  MISC_FEATURE (9)..(16): Crosslink between residues
  MOD_RES (16)..(16): Alpha-Me S5-pentenyl-alanine olefin amino acid connected by an all-carbon crosslinker comprising one double bond
  C-term NH2
IWGAQALRAIGDAFNAYYA

SEQ ID NO: 1553 - protein, 19 aa, Artificial Sequence
  Description of Artificial Sequence: Synthetic peptide
  N-term Ac
  MOD_RES (3)..(3): Ac6c
  MOD_RES (9)..(9): Alpha-Me R8-octenyl-alanine olefin amino acid connected by an all-carbon crosslinker comprising one double bond
  MISC_FEATURE (9)..(16): Crosslink between residues
  MOD_RES (16)..(16): Alpha-Me S5-pentenyl-alanine olefin amino acid connected by an all-carbon crosslinker comprising one double bond
  C-term NH2
IWXAQALRAIGDAFNAYYA

SEQ ID NO: 1554 - protein, 19 aa, Artificial Sequence
  Description of Artificial Sequence: Synthetic peptide
  N-term Ac
  MOD_RES (3)..(3): Ac5c
  MOD_RES (9)..(9): Alpha-Me R8-octenyl-alanine olefin amino acid connected by an all-carbon crosslinker comprising one double bond
  MISC_FEATURE (9)..(16): Crosslink between residues
  MOD_RES (16)..(16): Alpha-Me S5-pentenyl-alanine olefin amino acid connected by an all-carbon crosslinker comprising one double bond
  C-term NH2
IWXAQALRAIGDAFNAYYA

SEQ ID NO: 1555 - protein, 19 aa, Artificial Sequence
  Description of Artificial Sequence: Synthetic peptide
  N-term Ac
  MOD_RES (9)..(9): Alpha-Me R8-octenyl-alanine olefin amino acid connected by an all-carbon crosslinker comprising one double bond
  MISC_FEATURE (9)..(16): Crosslink between residues
  MOD_RES (16)..(16): Alpha-Me S5-pentenyl-alanine olefin amino acid connected by an all-carbon crosslinker comprising one double bond
  C-term NH2
EWIAAALRAIGDAFNAYYA

SEQ ID NO: 1556 - protein, 19 aa, Artificial Sequence
  Description of Artificial Sequence: Synthetic peptide
  N-term Ac
  MOD_RES (9)..(9): Alpha-Me R8-octenyl-alanine olefin amino acid connected by an all-carbon crosslinker comprising one double bond
  MISC_FEATURE (9)..(16): Crosslink between residues
  MOD_RES (16)..(16): Alpha-Me S5-pentenyl-alanine olefin amino acid connected by an all-carbon crosslinker comprising one double bond
  C-term NH2
RWIAAALRAIGDAFNAYYA

SEQ ID NO: 1557 - protein, 19 aa, Artificial Sequence
  Description of Artificial Sequence: Synthetic peptide
  N-term Ac
  MOD_RES (9)..(9): Alpha-Me R8-octenyl-alanine olefin amino acid connected by an all-carbon crosslinker comprising one double bond
  MISC_FEATURE (9)..(16): Crosslink between residues
  MOD_RES (16)..(16): Alpha-Me S5-pentenyl-alanine olefin amino acid connected by an all-carbon crosslinker comprising one double bond
  C-term NH2
KWIAAALRAIGDAFNAYYA

SEQ ID NO: 1558 - protein, 19 aa, Artificial Sequence
  Description of Artificial Sequence: Synthetic peptide
  N-term Ac
  MOD_RES (9)..(9): Alpha-Me R8-octenyl-alanine olefin amino acid connected by an all-carbon crosslinker comprising one double bond
  MISC_FEATURE (9)..(16): Crosslink between residues
  MOD_RES (16)..(16): Alpha-Me S5-pentenyl-alanine olefin amino acid connected by an all-carbon crosslinker comprising one double bond
  C-term NH2
HWIAAALRAIGDAFNAYYA

SEQ ID NO: 1559 - protein, 19 aa, Artificial Sequence
  Description of Artificial Sequence: Synthetic peptide
  N-term Ac
  MOD_RES (9)..(9): Alpha-Me R8-octenyl-alanine olefin amino acid connected by an all-carbon crosslinker comprising one double bond
  MISC_FEATURE (9)..(16): Crosslink between residues
  MOD_RES (16)..(16): Alpha-Me S5-pentenyl-alanine olefin amino acid connected by an all-carbon crosslinker comprising one double bond
  C-term NH2
SWIAAALRAIGDAFNAYYA

SEQ ID NO: 1560 - protein, 19 aa, Artificial Sequence
  Description of Artificial Sequence: Synthetic peptide
  N-term Ac
  MOD_RES (9)..(9): Alpha-Me R8-octenyl-alanine olefin amino acid connected by an all-carbon crosslinker comprising one double bond
  MISC_FEATURE (9)..(16): Crosslink between residues
  MOD_RES (16)..(16): Alpha-Me S5-pentenyl-alanine olefin amino acid connected by an all-carbon crosslinker comprising one double bond
  C-term NH2
QWIAAALRAIGDAFNAYYA

SEQ ID NO: 1561 - protein, 19 aa, Artificial Sequence
  Description of Artificial Sequence: Synthetic peptide
  N-term Ac
  MOD_RES (9)..(9): Alpha-Me R8-octenyl-alanine olefin amino acid connected by an all-carbon crosslinker comprising one double bond
  MISC_FEATURE (9)..(16): Crosslink between residues
  MOD_RES (16)..(16): Alpha-Me S5-pentenyl-alanine olefin amino acid connected by an all-carbon crosslinker comprising one double bond
  C-term NH2
AWIAAALRAIGDAFNAYYA

SEQ ID NO: 1562 - protein, 19 aa, Artificial Sequence
  Description of Artificial Sequence: Synthetic peptide
  N-term Ac
  MOD_RES (1)..(1): 2-aminoisobutyric acid
  MOD_RES (9)..(9): Alpha-Me R8-octenyl-alanine olefin amino acid connected by an all-carbon crosslinker comprising one double bond
  MISC_FEATURE (9)..(16): Crosslink between residues
  MOD_RES (16)..(16): Alpha-Me S5-pentenyl-alanine olefin amino acid connected by an all-carbon crosslinker comprising one double bond
  C-term NH2
XWIAAALRAIGDAFNAYYA

SEQ ID NO: 1563 - protein, 19 aa, Artificial Sequence
  Description of Artificial Sequence: Synthetic peptide
  N-term Ac
  MOD_RES (9)..(9): Alpha-Me R8-octenyl-alanine olefin amino acid connected by an all-carbon crosslinker comprising one double bond
  MISC_FEATURE (9)..(16): Crosslink between residues
  MOD_RES (16)..(16): Alpha-Me S5-pentenyl-alanine olefin amino acid connected by an all-carbon crosslinker comprising one double bond
  C-term NH2
FWIAAALRAIGDAFNAYYA

SEQ ID NO: 1564 - protein, 19 aa, Artificial Sequence
  Description of Artificial Sequence: Synthetic peptide
  N-term Ac
  MOD_RES (9)..(9): Alpha-Me R8-octenyl-alanine olefin amino acid connected by an all-carbon crosslinker comprising one double bond
  MISC_FEATURE (9)..(16): Crosslink between residues
  MOD_RES (16)..(16): Alpha-Me S5-pentenyl-alanine olefin amino acid connected by an all-carbon crosslinker comprising one double bond
  C-term NH2
IDIAAALRAIGDAFNAYYA

SEQ ID NO: 1565 - protein, 19 aa, Artificial Sequence
  Description of Artificial Sequence: Synthetic peptide
  N-term Ac
  MOD_RES (9)..(9): Alpha-Me R8-octenyl-alanine olefin amino acid connected by an all-carbon crosslinker comprising one double bond
  MISC_FEATURE (9)..(16): Crosslink between residues
  MOD_RES (16)..(16): Alpha-Me S5-pentenyl-alanine olefin amino acid connected by an all-carbon crosslinker comprising one double bond
  C-term NH2
IRIAAALRAIGDAFNAYYA

SEQ ID NO: 1566 - protein, 19 aa, Artificial Sequence
  Description of Artificial Sequence: Synthetic peptide
  N-term Ac
  MOD_RES (9)..(9): Alpha-Me R8-octenyl-alanine olefin amino acid connected by an all-carbon crosslinker comprising one double bond
  MISC_FEATURE (9)..(16): Crosslink between residues
  MOD_RES (16)..(16): Alpha-Me S5-pentenyl-alanine olefin amino acid connected by an all-carbon crosslinker comprising one double bond
  C-term NH2
IHIAAALRAIGDAFNAYYA

SEQ ID NO: 1567 - protein, 19 aa, Artificial Sequence
  Description of Artificial Sequence: Synthetic peptide
  N-term Ac
  MOD_RES (9)..(9): Alpha-Me R8-octenyl-alanine olefin amino acid connected by an all-carbon crosslinker comprising one double bond
  MISC_FEATURE (9)..(16): Crosslink between residues
  MOD_RES (16)..(16): Alpha-Me S5-pentenyl-alanine olefin amino acid connected by an all-carbon crosslinker comprising one double bond
  C-term NH2
ISIAAALRAIGDAFNAYYA

SEQ ID NO: 1568 - protein, 19 aa, Artificial Sequence
  Description of Artificial Sequence: Synthetic peptide
  N-term Ac
  MOD_RES (9)..(9): Alpha-Me R8-octenyl-alanine olefin amino acid connected by an all-carbon crosslinker comprising one double bond
  MISC_FEATURE (9)..(16): Crosslink between residues
  MOD_RES (16)..(16): Alpha-Me S5-pentenyl-alanine olefin amino acid connected by an all-carbon crosslinker comprising one double bond
  C-term NH2
INIAAALRAIGDAFNAYYA

SEQ ID NO: 1569 - protein, 19 aa, Artificial Sequence
  Description of Artificial Sequence: Synthetic peptide
  N-term Ac
  MOD_RES (9)..(9): Alpha-Me R8-octenyl-alanine olefin amino acid connected by an all-carbon crosslinker comprising one double bond
  MISC_FEATURE (9)..(16): Crosslink between residues
  MOD_RES (16)..(16): Alpha-Me S5-pentenyl-alanine olefin amino acid connected by an all-carbon crosslinker comprising one double bond
  C-term NH2
ILIAAALRAIGDAFNAYYA

SEQ ID NO: 1570 - protein, 19 aa, Artificial Sequence
  Description of Artificial Sequence: Synthetic peptide
  N-term Ac
  MOD_RES (9)..(9): Alpha-Me R8-octenyl-alanine olefin amino acid connected by an all-carbon crosslinker comprising one double bond
  MISC_FEATURE (9)..(16): Crosslink between residues
  MOD_RES (16)..(16): Alpha-Me S5-pentenyl-alanine olefin amino acid connected by an all-carbon crosslinker comprising one double bond
  C-term NH2
IFIAAALRAIGDAFNAYYA

SEQ ID NO: 1571 - protein, 19 aa, Artificial Sequence
  Description of Artificial Sequence: Synthetic peptide
  N-term Ac
  MOD_RES (2)..(2): 2-Naphthalanine
  MOD_RES (9)..(9): Alpha-Me R8-octenyl-alanine olefin amino acid connected by an all-carbon crosslinker comprising one double bond
  MISC_FEATURE (9)..(16): Crosslink between residues
  MOD_RES (16)..(16): Alpha-Me S5-pentenyl-alanine olefin amino acid connected by an all-carbon crosslinker comprising one double bond
  C-term NH2
IAIAAALRAIGDAFNAYYA

SEQ ID NO: 1572 - protein, 19 aa, Artificial Sequence
  Description of Artificial Sequence: Synthetic peptide
  N-term Ac
  MOD_RES (9)..(9): Alpha-Me R8-octenyl-alanine olefin amino acid connected by an all-carbon crosslinker comprising one double bond
  MISC_FEATURE (9)..(16): Crosslink between residues
  MOD_RES (16)..(16): Alpha-Me S5-pentenyl-alanine olefin amino acid connected by an all-carbon crosslinker comprising one double bond
  C-term NH2
IWISAALRAIGDAFNAYYA

SEQ ID NO: 1573 - protein, 19 aa, Artificial Sequence
  Description of Artificial Sequence: Synthetic peptide
  N-term Ac
  MOD_RES (9)..(9): Alpha-Me R8-octenyl-alanine olefin amino acid connected by an all-carbon crosslinker comprising one double bond
  MISC_FEATURE (9)..(16): Crosslink between residues
  MOD_RES (16)..(16): Alpha-Me S5-pentenyl-alanine olefin amino acid connected by an all-carbon crosslinker comprising one double bond
  C-term NH2
IWILAALRAIGDAFNAYYA

SEQ ID NO: 1574 - protein, 19 aa, Artificial Sequence
  Description of Artificial Sequence: Synthetic peptide
  N-term Ac
  MOD_RES (9)..(9): Alpha-Me R8-octenyl-alanine olefin amino acid connected by an all-carbon crosslinker comprising one double bond
  MISC_FEATURE (9)..(16): Crosslink between residues
  MOD_RES (16)..(16): Alpha-Me S5-pentenyl-alanine olefin amino acid connected by an all-carbon crosslinker comprising one double bond
  C-term NH2
IWIFAALRAIGDAFNAYYA

SEQ ID NO: 1575 - protein, 19 aa, Artificial Sequence
  Description of Artificial Sequence: Synthetic peptide
  N-term Ac
  MOD_RES (9)..(9): Alpha-Me R8-octenyl-alanine olefin amino acid connected by an all-carbon crosslinker comprising one double bond
  MISC_FEATURE (9)..(16): Crosslink between residues
  MOD_RES (16)..(16): Alpha-Me S5-pentenyl-alanine olefin amino acid connected by an all-carbon crosslinker comprising one double bond
  C-term NH2
IWIALALRAIGDAFNAYYA

SEQ ID NO: 1576 - protein, 19 aa, Artificial Sequence
  Description of Artificial Sequence: Synthetic peptide
  N-term Ac
  MOD_RES (8)..(8): 4-guanido-Phe
  MOD_RES (9)..(9): Alpha-Me R8-octenyl-alanine olefin amino acid connected by an all-carbon crosslinker comprising one double bond
  MISC_FEATURE (9)..(16): Crosslink between residues
  MOD_RES (16)..(16): Alpha-Me S5-pentenyl-alanine olefin amino acid connected by an all-carbon crosslinker comprising one double bond
  C-term NH2
IWIAAALFAIGDAFNAYYA

SEQ ID NO: 1577 - protein, 19 aa, Artificial Sequence
  Description of Artificial Sequence: Synthetic peptide
  N-term Ac
  MOD_RES (9)..(9): Alpha-Me R8-octenyl-alanine olefin amino acid connected by an all-carbon crosslinker comprising one double bond
  MISC_FEATURE (9)..(16): Crosslink between residues
  MOD_RES (16)..(16): Alpha-Me S5-pentenyl-alanine olefin amino acid connected by an all-carbon crosslinker comprising one double bond
  C-term NH2
IWIAAALKAIGDAFNAYYA

SEQ ID NO: 1578 - protein, 19 aa, Artificial Sequence
  Description of Artificial Sequence: Synthetic peptide
  N-term Ac
  MOD_RES (9)..(9): Alpha-Me R8-octenyl-alanine olefin amino acid connected by an all-carbon crosslinker comprising one double bond
  MISC_FEATURE (9)..(16): Crosslink between residues
  MOD_RES (11)..(11): Abu
  MOD_RES (16)..(16): Alpha-Me S5-pentenyl-alanine olefin amino acid connected by an all-carbon crosslinker comprising one double bond
  C-term NH2
IWIAAALRAIXDAFNAYYA

SEQ ID NO: 1579 - protein, 19 aa, Artificial Sequence
  Description of Artificial Sequence: Synthetic peptide
  N-term Ac
  MOD_RES (9)..(9): Alpha-Me R8-octenyl-alanine olefin amino acid connected by an all-carbon crosslinker comprising one double bond
  MISC_FEATURE (9)..(16): Crosslink between residues
  MOD_RES (16)..(16): Alpha-Me S5-pentenyl-alanine olefin amino acid connected by an all-carbon crosslinker comprising one double bond
  C-term NH2
IWIAAALRAIVDAFNAYYA

SEQ ID NO: 1580 - protein, 19 aa, Artificial Sequence
  Description of Artificial Sequence: Synthetic peptide
  N-term Ac
  MOD_RES (9)..(9): Alpha-Me R8-octenyl-alanine olefin amino acid connected by an all-carbon crosslinker comprising one double bond
  MISC_FEATURE (9)..(16): Crosslink between residues
  MOD_RES (16)..(16): Alpha-Me S5-pentenyl-alanine olefin amino acid connected by an all-carbon crosslinker comprising one double bond
  C-term NH2
IWIAAALRAIGEAFNAYYA

SEQ ID NO: 1581 - protein, 19 aa, Artificial Sequence
  Description of Artificial Sequence: Synthetic peptide
  N-term Ac
  MOD_RES (9)..(9): Alpha-Me R8-octenyl-alanine olefin amino acid connected by an all-carbon crosslinker comprising one double bond
  MISC_FEATURE (9)..(16): Crosslink between residues
  MOD_RES (16)..(16): Alpha-Me S5-pentenyl-alanine olefin amino acid connected by an all-carbon crosslinker comprising one double bond
  C-term NH2
IWIAAALRAIGDAGNAYYA

SEQ ID NO: 1582 - protein, 19 aa, Artificial Sequence
  Description of Artificial Sequence: Synthetic peptide
  N-term Ac
  MOD_RES (9)..(9): Alpha-Me R8-octenyl-alanine olefin amino acid connected by an all-carbon crosslinker comprising one double bond
  MISC_FEATURE (9)..(16): Crosslink between residues
  MOD_RES (16)..(16): Alpha-Me S5-pentenyl-alanine olefin amino acid connected by an all-carbon crosslinker comprising one double bond
  C-term NH2
IWIAQALRAIGDAWNAYYA

SEQ ID NO: 1583 - protein, 19 aa, Artificial Sequence
  Description of Artificial Sequence: Synthetic peptide
  N-term Ac
  MOD_RES (9)..(9): Alpha-Me R8-octenyl-alanine olefin amino acid connected by an all-carbon crosslinker comprising one double bond
  MISC_FEATURE (9)..(16): Crosslink between residues
  MOD_RES (14)..(14): homo-Phe
  MOD_RES (16)..(16): Alpha-Me S5-pentenyl-alanine olefin amino acid connected by an all-carbon crosslinker comprising one double bond
  C-term NH2
IWIAQALRAIGDAFNAYYA

SEQ ID NO: 1584 - protein, 19 aa, Artificial Sequence
  Description of Artificial Sequence: Synthetic peptide
  N-term Ac
  MOD_RES (9)..(9): Alpha-Me R8-octenyl-alanine olefin amino acid connected by an all-carbon crosslinker comprising one double bond
  MISC_FEATURE (9)..(16): Crosslink between residues
  MOD_RES (14)..(14): Phe-4CF3
  MOD_RES (16)..(16): Alpha-Me S5-pentenyl-alanine olefin amino acid connected by an all-carbon crosslinker comprising one double bond
  C-term NH2
IWIAQALRAIGDAFNAYYA

SEQ ID NO: 1585 - protein, 19 aa, Artificial Sequence
  Description of Artificial Sequence: Synthetic peptide
  N-term Ac
  MOD_RES (9)..(9): Alpha-Me R8-octenyl-alanine olefin amino acid connected by an all-carbon crosslinker comprising one double bond
  MISC_FEATURE (9)..(16): Crosslink between residues
  MOD_RES (14)..(14): Phe-4tBu
  MOD_RES (16)..(16): Alpha-Me S5-pentenyl-alanine olefin amino acid connected by an all-carbon crosslinker comprising one double bond
  C-term NH2
IWIAQALRAIGDAFNAYYA

SEQ ID NO: 1586 - protein, 19 aa, Artificial Sequence
  Description of Artificial Sequence: Synthetic peptide
  N-term Ac
  MOD_RES (9)..(9): Alpha-Me R8-octenyl-alanine olefin amino acid connected by an all-carbon crosslinker comprising one double bond
  MISC_FEATURE (9)..(16): Crosslink between residues
  MOD_RES (14)..(14): 2-Naphthalanine
  MOD_RES (16)..(16): Alpha-Me S5-pentenyl-alanine olefin amino acid connected by an all-carbon crosslinker comprising one double bond
  C-term NH2
IWIAQALRAIGDAANAYYA

SEQ ID NO: 1587 - protein, 19 aa, Artificial Sequence
  Description of Artificial Sequence: Synthetic peptide
  N-term Ac
  MOD_RES (9)..(9): Alpha-Me R8-octenyl-alanine olefin amino acid connected by an all-carbon crosslinker comprising one double bond
  MISC_FEATURE (9)..(16): Crosslink between residues
  MOD_RES (14)..(14): Bip
  MOD_RES (16)..(16): Alpha-Me S5-pentenyl-alanine olefin amino acid connected by an all-carbon crosslinker comprising one double bond
  C-term NH2
IWIAQALRAIGDAXNAYYA

SEQ ID NO: 1588 - protein, 19 aa, Artificial Sequence
  Description of Artificial Sequence: Synthetic peptide
  N-term Ac
  MOD_RES (9)..(9): Alpha-Me R8-octenyl-alanine olefin amino acid connected by an all-carbon crosslinker comprising one double bond
  MISC_FEATURE (9)..(16): Crosslink between residues
  MOD_RES (16)..(16): Alpha-Me S5-pentenyl-alanine olefin amino acid connected by an all-carbon crosslinker comprising one double bond
  C-term NH2
IWIAAALRAIGDAFDAYYA

SEQ ID NO: 1589 - protein, 19 aa, Artificial Sequence
  Description of Artificial Sequence: Synthetic peptide
  N-term Ac
  MOD_RES (9)..(9): Alpha-Me R8-octenyl-alanine olefin amino acid connected by an all-carbon crosslinker comprising one double bond
  MISC_FEATURE (9)..(16): Crosslink between residues
  MOD_RES (16)..(16): Alpha-Me S5-pentenyl-alanine olefin amino acid connected by an all-carbon crosslinker comprising one double bond
  C-term NH2
IWIAAALRAIGDAFEAYYA

SEQ ID NO: 1590 - protein, 19 aa, Artificial Sequence
  Description of Artificial Sequence: Synthetic peptide
  N-term Ac
  MOD_RES (9)..(9): Alpha-Me R8-octenyl-alanine olefin amino acid connected by an all-carbon crosslinker comprising one double bond
  MISC_FEATURE (9)..(16): Crosslink between residues
  MOD_RES (16)..(16): Alpha-Me S5-pentenyl-alanine olefin amino acid connected by an all-carbon crosslinker comprising one double bond
  C-term NH2
IWIAAALRAIGDAFQAYYA

SEQ ID NO: 1591 - protein, 19 aa, Artificial Sequence
  Description of Artificial Sequence: Synthetic peptide
  N-term Ac
  MOD_RES (9)..(9): Alpha-Me R8-octenyl-alanine olefin amino acid connected by an all-carbon crosslinker comprising one double bond
  MISC_FEATURE (9)..(16): Crosslink between residues
  MOD_RES (16)..(16): Alpha-Me S5-pentenyl-alanine olefin amino acid connected by an all-carbon crosslinker comprising one double bond
  C-term NH2
IWIAAALRAIGDAFSAYYA

SEQ ID NO: 1592 - protein, 19 aa, Artificial Sequence
  Description of Artificial Sequence: Synthetic peptide
  N-term Ac
  MOD_RES (9)..(9): Alpha-Me R8-octenyl-alanine olefin amino acid connected by an all-carbon crosslinker comprising one double bond
  MISC_FEATURE (9)..(16): Crosslink between residues
  MOD_RES (16)..(16): Alpha-Me S5-pentenyl-alanine olefin amino acid connected by an all-carbon crosslinker comprising one double bond
  C-term NH2
IWIAAALRAIGDAFHAYYA

SEQ ID NO: 1593 - protein, 19 aa, Artificial Sequence
  Description of Artificial Sequence: Synthetic peptide
  N-term Ac
  MOD_RES (9)..(9): Alpha-Me R8-octenyl-alanine olefin amino acid connected by an all-carbon crosslinker comprising one double bond
  MISC_FEATURE (9)..(16): Crosslink between residues
  MOD_RES (16)..(16): Alpha-Me S5-pentenyl-alanine olefin amino acid connected by an all-carbon crosslinker comprising one double bond
  C-term NH2
IWIAAALRAIGDAFNALYA

SEQ ID NO: 1594 - protein, 19 aa, Artificial Sequence
  Description of Artificial Sequence: Synthetic peptide
  N-term Ac
  MOD_RES (9)..(9): Alpha-Me R8-octenyl-alanine olefin amino acid connected by an all-carbon crosslinker comprising one double bond
  MISC_FEATURE (9)..(16): Crosslink between residues
  MOD_RES (16)..(16): Alpha-Me S5-pentenyl-alanine olefin amino acid connected by an all-carbon crosslinker comprising one double bond
  C-term NH2
IWIAQALRAIGDAFNAYAA

SEQ ID NO: 1595 - protein, 19 aa, Artificial Sequence
  Description of Artificial Sequence: Synthetic peptide
  N-term Ac
  MOD_RES (9)..(9): Alpha-Me R8-octenyl-alanine olefin amino acid connected by an all-carbon crosslinker comprising one double bond
  MISC_FEATURE (9)..(16): Crosslink between residues
  MOD_RES (16)..(16): Alpha-Me S5-pentenyl-alanine olefin amino acid connected by an all-carbon crosslinker comprising one double bond
  C-term NH2
IWIAQALRAIGDAFNAYLA

SEQ ID NO: 1596 - protein, 19 aa, Artificial Sequence
  Description of Artificial Sequence: Synthetic peptide
  N-term Ac
  MOD_RES (9)..(9): Alpha-Me R8-octenyl-alanine olefin amino acid connected by an all-carbon crosslinker comprising one double bond
  MISC_FEATURE (9)..(16): Crosslink between residues
  MOD_RES (16)..(16): Alpha-Me S5-pentenyl-alanine olefin amino acid connected by an all-carbon crosslinker comprising one double bond
  MOD_RES (18)..(18): Cyclohexyl-Ala
  C-term NH2
IWIAQALRAIGDAFNAYAA

SEQ ID NO: 1597 - protein, 19 aa, Artificial Sequence
  Description of Artificial Sequence: Synthetic peptide
  N-term Ac
  MOD_RES (9)..(9): Alpha-Me R8-octenyl-alanine olefin amino acid connected by an all-carbon crosslinker comprising one double bond
  MISC_FEATURE (9)..(16): Crosslink between residues
  MOD_RES (16)..(16): Alpha-Me S5-pentenyl-alanine olefin amino acid connected by an all-carbon crosslinker comprising one double bond
  MOD_RES (18)..(18): homo-Phe
  C-term NH2
IWIAQALRAIGDAFNAYFA

SEQ ID NO: 1598 - protein, 19 aa, Artificial Sequence
  Description of Artificial Sequence: Synthetic peptide
  N-term Ac
  MOD_RES (9)..(9): Alpha-Me R8-octenyl-alanine olefin amino acid connected by an all-carbon crosslinker comprising one double bond
  MISC_FEATURE (9)..(16): Crosslink between residues
  MOD_RES (16)..(16): Alpha-Me S5-pentenyl-alanine olefin amino acid connected by an all-carbon crosslinker comprising one double bond
  C-term NH2
IWIAQALRAIGDAFNAYWA

SEQ ID NO: 1599 - protein, 19 aa, Artificial Sequence
  Description of Artificial Sequence: Synthetic peptide
  N-term Ac
  MOD_RES (9)..(9): Alpha-Me R8-octenyl-alanine olefin amino acid connected by an all-carbon crosslinker comprising one double bond
  MISC_FEATURE (9)..(16): Crosslink between residues
  MOD_RES (16)..(16): Alpha-Me S5-pentenyl-alanine olefin amino acid connected by an all-carbon crosslinker comprising one double bond
  MOD_RES (18)..(18): 2-Naphthalanine
  C-term NH2
IWIAQALRAIGDAFNAYAA

SEQ ID NO: 1600 - protein, 19 aa, Artificial Sequence
  Description of Artificial Sequence: Synthetic peptide
  N-term Ac
  MOD_RES (9)..(9): Alpha-Me R8-octenyl-alanine olefin amino acid connected by an all-carbon crosslinker comprising one double bond
  MISC_FEATURE (9)..(16): Crosslink between residues
  MOD_RES (16)..(16): Alpha-Me S5-pentenyl-alanine olefin amino acid connected by an all-carbon crosslinker comprising one double bond
  C-term NH2
IWIAAALRAIGDAFNAYYD

SEQ ID NO: 1601 - protein, 19 aa, Artificial Sequence
  Description of Artificial Sequence: Synthetic peptide
  N-term Ac
  MOD_RES (9)..(9): Alpha-Me R8-octenyl-alanine olefin amino acid connected by an all-carbon crosslinker comprising one double bond
  MISC_FEATURE (9)..(16): Crosslink between residues
  MOD_RES (16)..(16): Alpha-Me S5-pentenyl-alanine olefin amino acid connected by an all-carbon crosslinker comprising one double bond
  C-term NH2
IWIAAALRAIGDAFNAYYE

SEQ ID NO: 1602 - protein, 19 aa, Artificial Sequence
  Description of Artificial Sequence: Synthetic peptide
  N-term Ac
  MOD_RES (9)..(9): Alpha-Me R8-octenyl-alanine olefin amino acid connected by an all-carbon crosslinker comprising one double bond
  MISC_FEATURE (9)..(16): Crosslink between residues
  MOD_RES (16)..(16): Alpha-Me S5-pentenyl-alanine olefin amino acid connected by an all-carbon crosslinker comprising one double bond
  C-term NH2
IWIAAALRAIGDAFNAYYQ

SEQ ID NO: 1603 - protein, 19 aa, Artificial Sequence
  Description of Artificial Sequence: Synthetic peptide
  N-term Ac
  MOD_RES (9)..(9): Alpha-Me R8-octenyl-alanine olefin amino acid connected by an all-carbon crosslinker comprising one double bond
  MISC_FEATURE (9)..(16): Crosslink between residues
  MOD_RES (16)..(16): Alpha-Me S5-pentenyl-alanine olefin amino acid connected by an all-carbon crosslinker comprising one double bond
  C-term NH2
IWIAAALRAIGDAFNAYYS

SEQ ID NO: 1604 - protein, 19 aa, Artificial Sequence
  Description of Artificial Sequence: Synthetic peptide
  N-term Ac
  MOD_RES (9)..(9): Alpha-Me R8-octenyl-alanine olefin amino acid connected by an all-carbon crosslinker comprising one double bond
  MISC_FEATURE (9)..(16): Crosslink between residues
  MOD_RES (16)..(16): Alpha-Me S5-pentenyl-alanine olefin amino acid connected by an all-carbon crosslinker comprising one double bond
  C-term NH2
IWIAAALRAIGDAFNAYYH

SEQ ID NO: 1605 - protein, 19 aa, Artificial Sequence
  Description of Artificial Sequence: Synthetic peptide
  N-term Ac
  MOD_RES (9)..(9): Alpha-Me R8-octenyl-alanine olefin amino acid connected by an all-carbon crosslinker comprising one double bond
  MISC_FEATURE (9)..(16): Crosslink between residues
  MOD_RES (16)..(16): Alpha-Me S5-pentenyl-alanine olefin amino acid connected by an all-carbon crosslinker comprising one double bond
  C-term NH2
IWIAAALRAIGDAFNAYYR

SEQ ID NO: 1606 - protein, 19 aa, Artificial Sequence
  Description of Artificial Sequence: Synthetic peptide
  N-term Ac
  MOD_RES (9)..(9): Alpha-Me R8-octenyl-alanine olefin amino acid connected by an all-carbon crosslinker comprising one double bond
  MISC_FEATURE (9)..(16): Crosslink between residues
  MOD_RES (16)..(16): Alpha-Me S5-pentenyl-alanine olefin amino acid connected by an all-carbon crosslinker comprising one double bond
  C-term NH2
IWIAAALRAIGDAFNAYYK

SEQ ID NO: 1607 - protein, 19 aa, Artificial Sequence
  Description of Artificial Sequence: Synthetic peptide
  N-term Ac
  MOD_RES (9)..(9): Alpha-Me R6-hexynyl-alanine alkynyl amino acids, crosslinked via a dialkyne bond to a second alkynyl amino acid
  MISC_FEATURE (9)..(16): Crosslink between residues
  MOD_RES (16)..(16): Alpha-Me S5-pentynyl-alanine alkynyl amino acids, wherein the alkyne forms one half of a dialkyne bond with a second alkynyl amino acid
  C-term NH2
IWIAQALRAIGDAFNAYYA

SEQ ID NO: 1608 - protein, 19 aa, Artificial Sequence
  Description of Artificial Sequence: Synthetic peptide
  N-term Ac
  MOD_RES (7)..(7): Alpha-Me-Leu
  MOD_RES (9)..(9): Alpha-Me R8-octenyl-alanine olefin amino acid connected by an all-carbon crosslinker comprising one double bond
  MISC_FEATURE (9)..(16): Crosslink between residues
  MOD_RES (16)..(16): Alpha-Me S5-pentenyl-alanine olefin amino acid connected by an all-carbon crosslinker comprising one double bond
  C-term NH2
IWIAQALRAIGDAFNAYYA

SEQ ID NO: 1609 - protein, 19 aa, Artificial Sequence
  Description of Artificial Sequence: Synthetic peptide
  N-term Ac
  MOD_RES (9)..(9): Alpha-Me R8-octenyl-alanine olefin amino acid connected by an all-carbon crosslinker comprising one double bond
  MISC_FEATURE (9)..(16): Crosslink between residues
  MOD_RES (12)..(12): Alpha-Me-Asp
  MOD_RES (16)..(16): Alpha-Me S5-pentenyl-alanine olefin amino acid connected by an all-carbon crosslinker comprising one double bond
  C-term NH2
IWIAQALRAIGDAFNAYYA

SEQ ID NO: 1610 - protein, 19 aa, Artificial Sequence
  Description of Artificial Sequence: Synthetic peptide
  N-term Ac
  MOD_RES (9)..(9): Alpha-Me R8-octenyl-alanine olefin amino acid connected by an all-carbon crosslinker comprising one double bond
  MISC_FEATURE (9)..(16): Crosslink between residues
  MOD_RES (16)..(16): Alpha-Me S5-pentenyl-alanine olefin amino acid connected by an all-carbon crosslinker comprising one double bond
  MOD_RES (17)..(17): Phe-4F
  C-term NH2
IWIAQALRAIGDAFNAFYA

SEQ ID NO: 1611 - protein, 19 aa, Artificial Sequence
  Description of Artificial Sequence: Synthetic peptide
  N-term Ac
  MOD_RES (9)..(9): Alpha-Me R8-octenyl-alanine olefin amino acid connected by an all-carbon crosslinker comprising one double bond
  MISC_FEATURE (9)..(16): Crosslink between residues
  MOD_RES (16)..(16): Alpha-Me S5-pentenyl-alanine olefin amino acid connected by an all-carbon crosslinker comprising one double bond
  MOD_RES (19)..(19): 2-aminoisobutyric acid
  C-term NH2
IWIAQALRAIGDAFNAYYX

SEQ ID NO: 1612 - protein, 19 aa, Artificial Sequence
  Description of Artificial Sequence: Synthetic peptide
  N-term Ac
  MOD_RES (8)..(8): Cit
  MOD_RES (9)..(9): Alpha-Me R8-octenyl-alanine olefin amino acid connected by an all-carbon crosslinker comprising one double bond
  MISC_FEATURE (9)..(16): Crosslink between residues
  MOD_RES (16)..(16): Alpha-Me S5-pentenyl-alanine olefin amino acid connected by an all-carbon crosslinker comprising one double bond
  C-term NH2
IWIAQAAXAIGDAFNAYYA

SEQ ID NO: 1613 - protein, 19 aa, Artificial Sequence
  Description of Artificial Sequence: Synthetic peptide
  N-term Ac
  MOD_RES (8)..(8): Cit
  MOD_RES (9)..(9): Alpha-Me R8-octenyl-alanine olefin amino acid connected by an all-carbon crosslinker comprising one double bond
  MISC_FEATURE (9)..(16): Crosslink between residues
  MOD_RES (16)..(16): Alpha-Me S5-pentenyl-alanine olefin amino acid connected by an all-carbon crosslinker comprising one double bond
  C-term NH2
IWIAQALXAIGNAFNAYYA

SEQ ID NO: 1614 - protein, 19 aa, Artificial Sequence
  Description of Artificial Sequence: Synthetic peptide
  N-term Ac
  MOD_RES (8)..(8): Cit
  MOD_RES (9)..(9): Alpha-Me R8-octenyl-alanine olefin amino acid connected by an all-carbon crosslinker comprising one double bond
  MISC_FEATURE (9)..(16): Crosslink between residues
  MOD_RES (16)..(16): Alpha-Me S5-pentenyl-alanine olefin amino acid connected by an all-carbon crosslinker comprising one double bond
  C-term NH2
IWIAQALXAIGDAANAYYA

SEQ ID NO: 1615 - protein, 19 aa, Artificial Sequence
  Description of Artificial Sequence: Synthetic peptide
  N-term Ac
  MOD_RES (8)..(8): Cit
  MOD_RES (9)..(9): Alpha-Me R8-octenyl-alanine olefin amino acid connected by an all-carbon crosslinker comprising one double bond
  MISC_FEATURE (9)..(16): Crosslink between residues
  MOD_RES (16)..(16): Alpha-Me S5-pentenyl-alanine olefin amino acid connected by an all-carbon crosslinker comprising one double bond
  C-term NH2
IWIAQALXAIGDAVNAYYA

SEQ ID NO: 1616 - protein, 19 aa, Artificial Sequence
  Description of Artificial Sequence: Synthetic peptide
  N-term Ac
  MOD_RES (6)..(6): Alpha-Me R8-octenyl-alanine olefin amino acid connected by an all-carbon crosslinker comprising one double bond
  MISC_FEATURE (6)..(13): Crosslink between residues
  MOD_RES (13)..(13): Alpha-Me S5-pentenyl-alanine olefin amino acid connected by an all-carbon crosslinker comprising one double bond
  C-term NH2
IWIAQALRAIGDAFNAYYA

SEQ ID NO: 1617 - protein, 19 aa, Artificial Sequence
  Description of Artificial Sequence: Synthetic peptide
  N-term Ac
  MOD_RES (6)..(6): Alpha-Me R8-octenyl-alanine olefin amino acid connected by an all-carbon crosslinker comprising one double bond
  MISC_FEATURE (6)..(13): Crosslink between residues
  MOD_RES (8)..(8): Cit
  MOD_RES (13)..(13): Alpha-Me S5-pentenyl-alanine olefin amino acid connected by an all-carbon crosslinker comprising one double bond
  C-term NH2
IWIAQALXAIGDAFNAYYA

SEQ ID NO: 1618 - protein, 19 aa, Artificial Sequence
  Description of Artificial Sequence: Synthetic peptide
  N-term Ac
  MOD_RES (9)..(9): Alpha-Me R8-octenyl-alanine olefin amino acid connected by an all-carbon crosslinker comprising one double bond
  MISC_FEATURE (9)..(16): Crosslink between residues
  MOD_RES (16)..(16): Alpha-Me S5-pentenyl-alanine olefin amino acid connected by an all-carbon crosslinker comprising one double bond
  C-term NH2
IWIAQALRAIGDAFNAAYA

SEQ ID NO: 1619 - protein, 19 aa, Artificial Sequence
  Description of Artificial Sequence: Synthetic peptide
  N-term Ac
  MOD_RES (6)..(6): Alpha-Me R8-octenyl-alanine olefin amino acid connected by an all-carbon crosslinker comprising one double bond
  MISC_FEATURE (6)..(13): Crosslink between residues
  MOD_RES (13)..(13): Alpha-Me S5-pentenyl-alanine olefin amino acid connected by an all-carbon crosslinker comprising one double bond
  C-term NH2
IWIAQALRRIGDAFNAYYA

SEQ ID NO: 1620 - protein, 19 aa, Artificial Sequence
  Description of Artificial Sequence: Synthetic peptide
  N-term Ac
  MOD_RES (9)..(9): Alpha-Me R8-octenyl-alanine olefin amino acid connected by an all-carbon crosslinker comprising one double bond
  MISC_FEATURE (9)..(16): Crosslink between residues
  MOD_RES (10)..(10): hLeu
  MOD_RES (16)..(16): Alpha-Me S5-pentenyl-alanine olefin amino acid connected by an all-carbon crosslinker comprising one double bond
  MOD_RES (17)..(17): Phe-4F
  C-term NH2
IWIAQALRALGDAFNAFYA

SEQ ID NO: 1621 - protein, 19 aa, Artificial Sequence
  Description of Artificial Sequence: Synthetic peptide
  N-term Ac
  MOD_RES (9)..(9): Alpha-Me R8-octenyl-alanine olefin amino acid connected by an all-carbon crosslinker comprising one double bond
  MISC_FEATURE (9)..(16): Crosslink between residues
  MOD_RES (10)..(10): hLeu
  MOD_RES (16)..(16): Alpha-Me S5-pentenyl-alanine olefin amino acid connected by an all-carbon crosslinker comprising one double bond
  MOD_RES (18)..(18): Phe-4F
  C-term NH2
IWIAQALRALGDAFNAYFA

SEQ ID NO: 1622 - protein, 19 aa, Artificial Sequence
  Description of Artificial Sequence: Synthetic peptide
  N-term Ac
  MOD_RES (9)..(9): Alpha-Me R8-octenyl-alanine olefin amino acid connected by an all-carbon crosslinker comprising one double bond
  MISC_FEATURE (9)..(16): Crosslink between residues
  MOD_RES (10)..(10): hLeu
  MOD_RES (16)..(16): Alpha-Me S5-pentenyl-alanine olefin amino acid connected by an all-carbon crosslinker comprising one double bond
  MOD_RES (17)..(17): Phe-4F
  MOD_RES (18)..(18): Phe-4F
  C-term NH2
IWIAQALRALGDAFNAFFA

SEQ ID NO: 1623 - protein, 19 aa, Artificial Sequence
  Description of Artificial Sequence: Synthetic peptide
  N-term Ac
  MOD_RES (9)..(9): Alpha-Me R8-octenyl-alanine olefin amino acid connected by an all-carbon crosslinker comprising one double bond
  MISC_FEATURE (9)..(16): Crosslink between residues
  MOD_RES (10)..(10): hLeu
  MOD_RES (16)..(16): Alpha-Me S5-pentenyl-alanine olefin amino acid connected by an all-carbon crosslinker comprising one double bond
  MOD_RES (18)..(18): Phe-4F
  C-term NH2
AWIAAALRALGDAFNAYFA

SEQ ID NO: 1624 - protein, 19 aa, Artificial Sequence
  Description of Artificial Sequence: Synthetic peptide
  N-term Ac
  MOD_RES (9)..(9): Alpha-Me R8-octenyl-alanine olefin amino acid connected by an all-carbon crosslinker comprising one double bond
  MISC_FEATURE (9)..(16): Crosslink between residues
  MOD_RES (10)..(10): hLeu
  MOD_RES (16)..(16): Alpha-Me S5-pentenyl-alanine olefin amino acid connected by an all-carbon crosslinker comprising one double bond
  MOD_RES (18)..(18): Phe-4F
  C-term NH2
AWIAAALRALGDAFNAAFA

SEQ ID NO: 1625 - protein, 19 aa, Artificial Sequence
  Description of Artificial Sequence: Synthetic peptide
  N-term Ac
  MOD_RES (9)..(9): Alpha-Me R8-octenyl-alanine olefin amino acid connected by an all-carbon crosslinker comprising one double bond
  MISC_FEATURE (9)..(16): Crosslink between residues
  MOD_RES (10)..(10): hLeu
  MOD_RES (16)..(16): Alpha-Me S5-pentenyl-alanine olefin amino acid connected by an all-carbon crosslinker comprising one double bond
  MOD_RES (17)..(17): Phe-4F
  MOD_RES (18)..(18): Phe-4F
  C-term NH2
IWIAQAARALGDAFNAFFA

SEQ ID NO: 1626 - protein, 20 aa, Artificial Sequence
  Description of Artificial Sequence: Synthetic peptide
  MOD_RES (1)..(1): An amino acid with an electron accepting group susceptible to attack by a nucleophile
  MOD_RES (8)..(8): Alpha-Me S5-pentenyl-alanine olefin amino acid connected by an all-carbon crosslinker comprising one double bond
  MISC_FEATURE (8)..(12): Crosslink between residues
  MOD_RES (12)..(12): Alpha-Me S5-pentenyl-alanine olefin amino acid connected by an all-carbon crosslinker comprising one double bond
  C-term NH2
XIAQELRAIGDAFNAYYARR

SEQ ID NO: 1627 - protein, 18 aa, Artificial Sequence
  Description of Artificial Sequence: Synthetic peptide
  MOD_RES (1)..(1): An amino acid with an electron accepting group susceptible to attack by a nucleophile
  MOD_RES (8)..(8): Alpha-Me R8-octenyl-alanine olefin amino acid connected by an all-carbon crosslinker comprising one double bond
  MISC_FEATURE (8)..(15): Crosslink between residues
  MOD_RES (9)..(9): hLeu
  MOD_RES (15)..(15): Alpha-Me S5-pentenyl-alanine olefin amino acid connected by an all-carbon crosslinker comprising one double bond
  MOD_RES (17)..(17): Phe-4F
  C-term NH2
XIAQALRALGDAFNAYFA

SEQ ID NO: 1628 - protein, 21 aa, Artificial Sequence
  Description of Artificial Sequence: Synthetic peptide
  N-term Ac
  MOD_RES (9)..(9): Alpha-Me R8-octenyl-alanine olefin amino acid connected by an all-carbon crosslinker comprising one double bond
  MISC_FEATURE (9)..(16): Crosslink between residues
  MOD_RES (16)..(16): Alpha-Me S5-pentenyl-alanine olefin amino acid connected by an all-carbon crosslinker comprising one double bond
  C-term NH2
IWIAQALRAIGDEFNAYYARR

SEQ ID NO: 1629 - protein, 21 aa, Artificial Sequence
  Description of Artificial Sequence: Synthetic peptide
  N-term Ac
  MOD_RES (9)..(9): Alpha-Me R8-octenyl-alanine olefin amino acid connected by an all-carbon crosslinker comprising one double bond
  MISC_FEATURE (9)..(16): Crosslink between residues
  MOD_RES (16)..(16): Alpha-Me S5-pentenyl-alanine olefin amino acid connected by an all-carbon crosslinker comprising one double bond
  C-term NH2
IWIAQELRAIGDEFNAYYARR

SEQ ID NO: 1630 - protein, 18 aa, Artificial Sequence
  Description of Artificial Sequence: Synthetic peptide
  N-term Ac
  MOD_RES (8)..(8): Alpha-Me R8-octenyl-alanine olefin amino acid connected by an all-carbon crosslinker comprising one double bond
  MISC_FEATURE (8)..(15): Crosslink between residues
  MOD_RES (15)..(15): Alpha-Me S5-pentenyl-alanine olefin amino acid connected by an all-carbon crosslinker comprising one double bond
  C-term NH2
WIAQALRAIGDAFNAYYA

SEQ ID NO: 1631 - protein, 17 aa, Artificial Sequence
  Description of Artificial Sequence: Synthetic peptide
  N-term Ac
  MOD_RES (7)..(7): Alpha-Me R8-octenyl-alanine olefin amino acid connected by an all-carbon crosslinker comprising one double bond
  MISC_FEATURE (7)..(14): Crosslink between residues
  MOD_RES (14)..(14): Alpha-Me S5-pentenyl-alanine olefin amino acid connected by an all-carbon crosslinker comprising one double bond
  C-term NH2
IAQALRAIGDAFAAYYA

SEQ ID NO: 1632 - protein, 17 aa, Artificial Sequence
  Description of Artificial Sequence: Synthetic peptide
  N-term Ac
  MOD_RES (7)..(7): Alpha-Me R8-octenyl-alanine olefin amino acid connected by an all-carbon crosslinker comprising one double bond
  MISC_FEATURE (7)..(14): Crosslink between residues
  MOD_RES (14)..(14): Alpha-Me S5-pentenyl-alanine olefin amino acid connected by an all-carbon crosslinker comprising one double bond
  C-term NH2
IAQALRAIGDAFNAYAA

SEQ ID NO: 1633 - protein, 19 aa, Artificial Sequence
  Description of Artificial Sequence: Synthetic peptide
  N-term Ac
  MOD_RES (9)..(9): Alpha-Me R8-octenyl-alanine olefin amino acid connected by an all-carbon crosslinker comprising one double bond
  MISC_FEATURE (9)..(16): Crosslink between residues
  MOD_RES (16)..(16): Alpha-Me S5-pentenyl-alanine olefin amino acid connected by an all-carbon crosslinker comprising one double bond
  C-term NH2
IWIAQALRAIGDAFNAYYA

SEQ ID NO: 1634 - protein, 18 aa, Artificial Sequence
  Description of Artificial Sequence: Synthetic peptide
  N-term Ac
  MOD_RES (8)..(8): Alpha-Me R8-octenyl-alanine olefin amino acid connected by an all-carbon crosslinker comprising one double bond
  MISC_FEATURE (8)..(15): Crosslink between residues
  MOD_RES (15)..(15): Alpha-Me S5-pentenyl-alanine olefin amino acid connected by an all-carbon crosslinker comprising one double bond
  C-term NH2
WIAQALRAIGDAFNAYYA

SEQ ID NO: 1635 - protein, 17 aa, Artificial Sequence
  Description of Artificial Sequence: Synthetic peptide
  N-term Ac
  MOD_RES (7)..(7): Alpha-Me R8-octenyl-alanine olefin amino acid connected by an all-carbon crosslinker comprising one double bond
  MISC_FEATURE (7)..(14): Crosslink between residues
  MOD_RES (14)..(14): Alpha-Me S5-pentenyl-alanine olefin amino acid connected by an all-carbon crosslinker comprising one double bond
  C-term NH2
IAQALRAIGDAFNAYYA

SEQ ID NO: 1636 - protein, 17 aa, Artificial Sequence
  Description of Artificial Sequence: Synthetic peptide
  N-term Ac
  MOD_RES (7)..(7): Alpha-Me R8-octenyl-alanine olefin amino acid connected by an all-carbon crosslinker comprising one double bond
  MISC_FEATURE (7)..(14): Crosslink between residues
  MOD_RES (14)..(14): Alpha-Me S5-pentenyl-alanine olefin amino acid connected by an all-carbon crosslinker comprising one double bond
  C-term NH2
IAAALRAIGDAFNAYYA

SEQ ID NO: 1637 - protein, 17 aa, Artificial Sequence
  Description of Artificial Sequence: Synthetic peptide
  N-term Ac
  MOD_RES (7)..(7): Alpha-Me R8-octenyl-alanine olefin amino acid connected by an all-carbon crosslinker comprising one double bond
  MISC_FEATURE (7)..(14): Crosslink between residues
  MOD_RES (14)..(14): Alpha-Me S5-pentenyl-alanine olefin amino acid connected by an all-carbon crosslinker comprising one double bond
  C-term NH2
IAQALAAIGDAFNAYYA

SEQ ID NO: 1638 - protein, 17 aa, Artificial Sequence
  Description of Artificial Sequence: Synthetic peptide
  N-term Ac
  MOD_RES (7)..(7): Alpha-Me R8-octenyl-alanine olefin amino acid connected by an all-carbon crosslinker comprising one double bond
  MISC_FEATURE (7)..(14): Crosslink between residues
  MOD_RES (14)..(14): Alpha-Me S5-pentenyl-alanine olefin amino acid connected by an all-carbon crosslinker comprising one double bond
  C-term NH2
IAQALRAIADAFNAYYA

SEQ ID NO: 1639 - protein, 17 aa, Artificial Sequence
  Description of Artificial Sequence: Synthetic peptide
  N-term Ac
  MOD_RES (7)..(7): Alpha-Me R8-octenyl-alanine olefin amino acid connected by an all-carbon crosslinker comprising one double bond
  MISC_FEATURE (7)..(14): Crosslink between residues
  MOD_RES (14)..(14): Alpha-Me S5-pentenyl-alanine olefin amino acid connected by an all-carbon crosslinker comprising one double bond
  C-term NH2
IAQALRAIGDAANAYYA

SEQ ID NO: 1640 - protein, 17 aa, Artificial Sequence
  Description of Artificial Sequence: Synthetic peptide
  N-term Ac
  MOD_RES (7)..(7): Alpha-Me R8-octenyl-alanine olefin amino acid connected by an all-carbon crosslinker comprising one double bond
  MISC_FEATURE (7)..(14): Crosslink between residues
  MOD_RES (14)..(14): Alpha-Me S5-pentenyl-alanine olefin amino acid connected by an all-carbon crosslinker comprising one double bond
  C-term NH2
IAQALRAIGDAFNAAYA

SEQ ID NO: 1641 - protein, 19 aa, Artificial Sequence
  Description of Artificial Sequence: Synthetic peptide
  N-term Ac
  MOD_RES (2)..(2): Alpha-Me S5-pentenyl-alanine olefin amino acid connected by an all-carbon crosslinker comprising one double bond
  MISC_FEATURE (2)..(6): Crosslink between residues
  MOD_RES (6)..(6): Alpha-Me S5-pentenyl-alanine olefin amino acid connected by an all-carbon crosslinker comprising one double bond
  MOD_RES (9)..(9): Alpha-Me R8-octenyl-alanine olefin amino acid connected by an all-carbon crosslinker comprising one double bond
  MISC_FEATURE (9)..(16): Crosslink between residues
  MOD_RES (16)..(16): Alpha-Me S5-pentenyl-alanine olefin amino acid connected by an all-carbon crosslinker comprising one double bond
  C-term NH2
IAIAQALRAIGDEFNAYYA

SEQ ID NO: 1642 - protein, 19 aa, Artificial Sequence
  Description of Artificial Sequence: Synthetic peptide
  N-term Ac
  MOD_RES (9)..(9): reduced alpha-Me R8-octenyl-alanine olefin amino acid connected by an all-carbon crosslinker comprising one double bond
  MISC_FEATURE (9)..(16): Crosslink between residues
  MOD_RES (16)..(16): Modified alanine amino acid connected by a reduced olefin crosslinker
  C-term NH2
IWIAQALRAIGDAFNAYYA

SEQ ID NO: 1643 - protein, 19 aa, Artificial Sequence
  Description of Artificial Sequence: Synthetic peptide
  N-term Ac
  MOD_RES (9)..(9): Alpha-Me R8-octenyl-alanine olefin amino acid connected by an all-carbon crosslinker comprising one double bond
  MISC_FEATURE (9)..(16): Crosslink between residues
  MOD_RES (16)..(16): Alpha-Me S5-pentenyl-alanine olefin amino acid connected by an all-carbon crosslinker comprising one double bond
  C-term NH2
IWIAQALRAIGDEFAAYYA

SEQ ID NO: 1644 - protein, 19 aa, Artificial Sequence
  Description of Artificial Sequence: Synthetic peptide
  N-term Ac
  MOD_RES (9)..(9): Alpha-Me R8-octenyl-alanine olefin amino acid connected by an all-carbon crosslinker comprising one double bond
  MISC_FEATURE (9)..(16): Crosslink between residues
  MOD_RES (16)..(16): Alpha-Me S5-pentenyl-alanine olefin amino acid connected by an all-carbon crosslinker comprising one double bond
  C-term NH2
IWIAQALRAIGDQANAYYA

SEQ ID NO: 1645 - protein, 20 aa, Artificial Sequence
  Description of Artificial Sequence: Synthetic peptide
  N-term FITC
  MOD_RES (1)..(1): Beta-Ala
  MOD_RES (10)..(10): Alpha-Me R8-octenyl-alanine olefin amino acid connected by an all-carbon crosslinker comprising one double bond
  MISC_FEATURE (10)..(17): Crosslink between residues
  MOD_RES (17)..(17): Alpha-Me S5-pentenyl-alanine olefin amino acid connected by an all-carbon crosslinker comprising one double bond
  C-term NH2
AIWIAQALRAIGDAFNAYYA

SEQ ID NO: 1646 - protein, 20 aa, Artificial Sequence
  Description of Artificial Sequence: Synthetic peptide
  N-term 5-FAM
  MOD_RES (1)..(1): Beta-Ala
  MOD_RES (10)..(10): Alpha-Me R8-octenyl-alanine olefin amino acid connected by an all-carbon crosslinker comprising one double bond
  MISC_FEATURE (10)..(17): Crosslink between residues
  MOD_RES (17)..(17): Alpha-Me S5-pentenyl-alanine olefin amino acid connected by an all-carbon crosslinker comprising one double bond
  C-term NH2
AIWIAQALRAIGDAFNAYYA

SEQ ID NO: 1647 - protein, 20 aa, Artificial Sequence
  Description of Artificial Sequence: Synthetic peptide
  N-term 5-FAM
  MOD_RES (1)..(1): Beta-Ala
  MOD_RES (10)..(10): Alpha-Me R8-octenyl-alanine olefin amino acid connected by an all-carbon crosslinker comprising one double bond
  MISC_FEATURE (10)..(17): Crosslink between residues
  MOD_RES (17)..(17): Alpha-Me S5-pentenyl-alanine olefin amino acid connected by an all-carbon crosslinker comprising one double bond
  C-term NH2
AIWIAQALRAIGDEFNAYYA

SEQ ID NO: 1648 - protein, 19 aa, Artificial Sequence
  Description of Artificial Sequence: Synthetic peptide
  N-term Ac
  MOD_RES (9)..(9): Alpha-Me R8-octenyl-alanine olefin amino acid connected by an all-carbon crosslinker comprising one double bond
  MISC_FEATURE (9)..(16): Crosslink between residues
  MOD_RES (16)..(16): Alpha-Me S5-pentenyl-alanine olefin amino acid connected by an all-carbon crosslinker comprising one double bond
  C-term NH2
IAIAQALRAIGDAFNAYYA

SEQ ID NO: 1649 - protein, 19 aa, Artificial Sequence
  Description of Artificial Sequence: Synthetic peptide
  N-term Ac
  MOD_RES (9)..(9): Alpha-Me R8-octenyl-alanine olefin amino acid connected by an all-carbon crosslinker comprising one double bond
  MISC_FEATURE (9)..(16): Crosslink between residues
  MOD_RES (16)..(16): Alpha-Me S5-pentenyl-alanine olefin amino acid connected by an all-carbon crosslinker comprising one double bond
  C-term NH2
IWIAQALRAIGDEFNAYYA

SEQ ID NO: 1650 - protein, 19 aa, Artificial Sequence
  Description of Artificial Sequence: Synthetic peptide
  N-term Ac
  MOD_RES (9)..(9): Alpha-Me R8-octenyl-alanine olefin amino acid connected by an all-carbon crosslinker comprising one double bond
  MISC_FEATURE (9)..(16): Crosslink between residues
  MOD_RES (16)..(16): Alpha-Me S5-pentenyl-alanine olefin amino acid connected by an all-carbon crosslinker comprising one double bond
  C-term NH2
IWIAQALRAIGDQFNAYYA

SEQ ID NO: 1651 - protein, 19 aa, Artificial Sequence
  Description of Artificial Sequence: Synthetic peptide
  N-term Ac
  MOD_RES (9)..(9): Alpha-Me R8-octenyl-alanine olefin amino acid connected by an all-carbon crosslinker comprising one double bond
  MISC_FEATURE (9)..(16): Crosslink between residues
  MOD_RES (16)..(16): Alpha-Me S5-pentenyl-alanine olefin amino acid connected by an all-carbon crosslinker comprising one double bond
  C-term NH2
IWIAAALRAIGDEFNAYYA

SEQ ID NO: 1652 - protein, 19 aa, Artificial Sequence
  Description of Artificial Sequence: Synthetic peptide
  N-term Ac
  MOD_RES (9)..(9): Alpha-Me R8-octenyl-alanine olefin amino acid connected by an all-carbon crosslinker comprising one double bond
  MISC_FEATURE (9)..(16): Crosslink between residues
  MOD_RES (16)..(16): Alpha-Me S5-pentenyl-alanine olefin amino acid connected by an all-carbon crosslinker comprising one double bond
  C-term NH2
IWIAAALRAIGDQFNAYYA

SEQ ID NO: 1653 - protein, 19 aa, Artificial Sequence
  Description of Artificial Sequence: Synthetic peptide
  N-term Ac
  MOD_RES (9)..(9): Alpha-Me R8-octenyl-alanine olefin amino acid connected by an all-carbon crosslinker comprising one double bond
  MISC_FEATURE (9)..(16): Crosslink between residues
  MOD_RES (16)..(16): Alpha-Me S5-pentenyl-alanine olefin amino acid connected by an all-carbon crosslinker comprising one double bond
  C-term NH2
IWIAAALRAIGDAFNAYYA

SEQ ID NO: 1654 - protein, 19 aa, Artificial Sequence
  Description of Artificial Sequence: Synthetic peptide
  N-term Ac
  MOD_RES (9)..(9): Alpha-Me R8-octenyl-alanine olefin amino acid connected by an all-carbon crosslinker comprising one double bond
  MISC_FEATURE (9)..(16): Crosslink between residues
  MOD_RES (16)..(16): Alpha-Me S5-pentenyl-alanine olefin amino acid connected by an all-carbon crosslinker comprising one double bond
  C-term NH2
IWIAQALRAIGDAFAAYYA

SEQ ID NO: 1655 - protein, 19 aa, Artificial Sequence
  Description of Artificial Sequence: Synthetic peptide
  N-term Ac
  MOD_RES (8)..(8): Cit
  MOD_RES (9)..(9): Alpha-Me R8-octenyl-alanine olefin amino acid connected by an all-carbon crosslinker comprising one double bond
  MISC_FEATURE (9)..(16): Crosslink between residues
  MOD_RES (16)..(16): Alpha-Me S5-pentenyl-alanine olefin amino acid connected by an all-carbon crosslinker comprising one double bond
  C-term NH2
IWIAQALXAIGDAFNAYYA

SEQ ID NO: 1656 - protein, 19 aa, Artificial Sequence
  Description of Artificial Sequence: Synthetic peptide
  N-term Ac
  MOD_RES (8)..(8): Cit
  MOD_RES (9)..(9): Alpha-Me R8-octenyl-alanine olefin amino acid connected by an all-carbon crosslinker comprising one double bond
  MISC_FEATURE (9)..(16): Crosslink between residues
  MOD_RES (16)..(16): Alpha-Me S5-pentenyl-alanine olefin amino acid connected by an all-carbon crosslinker comprising one double bond
  C-term NH2
IWIAQALXAIGDQFNAYYA

SEQ ID NO: 1657 - protein, 19 aa, Artificial Sequence
  Description of Artificial Sequence: Synthetic peptide
  N-term Ac
  MOD_RES (9)..(9): Alpha-Me R8-octenyl-alanine olefin amino acid connected by an all-carbon crosslinker comprising one double bond
  MISC_FEATURE (9)..(16): Crosslink between residues
  MOD_RES (16)..(16): Alpha-Me S5-pentenyl-alanine olefin amino acid connected by an all-carbon crosslinker comprising one double bond
  C-term NH2
IWIAQALHAIGDAFNAYYA

SEQ ID NO: 1658 - protein, 19 aa, Artificial Sequence
  Description of Artificial Sequence: Synthetic peptide
  N-term Ac
  MOD_RES (9)..(9): Alpha-Me R8-octenyl-alanine olefin amino acid connected by an all-carbon crosslinker comprising one double bond
  MISC_FEATURE (9)..(16): Crosslink between residues
  MOD_RES (16)..(16): Alpha-Me S5-pentenyl-alanine olefin amino acid connected by an all-carbon crosslinker comprising one double bond
  C-term NH2
IWIAQALHAIGDQFNAYYA

SEQ ID NO: 1659 - protein, 19 aa, Artificial Sequence
  Description of Artificial Sequence: Synthetic peptide
  N-term Ac
  MOD_RES (9)..(9): Alpha-Me R8-octenyl-alanine olefin amino acid connected by an all-carbon crosslinker comprising one double bond
  MISC_FEATURE (9)..(16): Crosslink between residues
  MOD_RES (16)..(16): Alpha-Me S5-pentenyl-alanine olefin amino acid connected by an all-carbon crosslinker comprising one double bond
  C-term NH2
IWIAQALQAIGDAFNAYYA

SEQ ID NO: 1660 - protein, 19 aa, Artificial Sequence
  Description of Artificial Sequence: Synthetic peptide
  N-term Ac
  MOD_RES (9)..(9): Alpha-Me R8-octenyl-alanine olefin amino acid connected by an all-carbon crosslinker comprising one double bond
  MISC_FEATURE (9)..(16): Crosslink between residues
  MOD_RES (16)..(16): Alpha-Me S5-pentenyl-alanine olefin amino acid connected by an all-carbon crosslinker comprising one double bond
  C-term NH2
IWIAQALQAIGDQFNAYYA

SEQ ID NO: 1661 - protein, 19 aa, Artificial Sequence
  Description of Artificial Sequence: Synthetic peptide
  N-term Ac
  MOD_RES (9)..(9): Alpha-Me R8-octenyl-alanine olefin amino acid connected by an all-carbon crosslinker comprising one double bond
  MISC_FEATURE (9)..(16): Crosslink between residues
  MOD_RES (16)..(16): Alpha-Me S5-pentenyl-alanine olefin amino acid connected by an all-carbon crosslinker comprising one double bond
  C-term NH2
IWIAQALRAIGDAANAYYA

SEQ ID NO: 1662 - protein, 19 aa, Artificial Sequence
  Description of Artificial Sequence: Synthetic peptide
  N-term Ac
  MOD_RES (9)..(9): Alpha-Me R8-octenyl-alanine olefin amino acid connected by an all-carbon crosslinker comprising one double bond
  MISC_FEATURE (9)..(16): Crosslink between residues
  MOD_RES (16)..(16): Alpha-Me S5-pentenyl-alanine olefin amino acid connected by an all-carbon crosslinker comprising one double bond
  C-term NH2
IWIAQALRAIGDAINAYYA

SEQ ID NO: 1663 - protein, 19 aa, Artificial Sequence
  Description of Artificial Sequence: Synthetic peptide
  N-term Ac
  MOD_RES (9)..(9): Alpha-Me R8-octenyl-alanine olefin amino acid connected by an all-carbon crosslinker comprising one double bond
  MISC_FEATURE (9)..(16): Crosslink between residues
  MOD_RES (16)..(16): Alpha-Me S5-pentenyl-alanine olefin amino acid connected by an all-carbon crosslinker comprising one double bond
  C-term NH2
IWIAQALRAIGDQINAYYA

SEQ ID NO: 1664 - protein, 19 aa, Artificial Sequence
  Description of Artificial Sequence: Synthetic peptide
  N-term Ac
  MOD_RES (9)..(9): Alpha-Me R8-octenyl-alanine olefin amino acid connected by an all-carbon crosslinker comprising one double bond
  MISC_FEATURE (9)..(16): Crosslink between residues
  MOD_RES (16)..(16): Alpha-Me S5-pentenyl-alanine olefin amino acid connected by an all-carbon crosslinker comprising one double bond
  C-term NH2
IWIAQAARAIGDAANAYYA

SEQ ID NO: 1665 - protein, 19 aa, Artificial Sequence
  Description of Artificial Sequence: Synthetic peptide
  N-term Ac
  MOD_RES (9)..(9): Alpha-Me R8-octenyl-alanine olefin amino acid connected by an all-carbon crosslinker comprising one double bond
  MISC_FEATURE (9)..(16): Crosslink between residues
  MOD_RES (16)..(16): Alpha-Me S5-pentenyl-alanine olefin amino acid connected by an all-carbon crosslinker comprising one double bond
  C-term NH2
IWIAQALRAIADAFNAYYA

SEQ ID NO: 1666 - protein, 19 aa, Artificial Sequence
  Description of Artificial Sequence: Synthetic peptide
  N-term Ac
  MOD_RES (9)..(9): Alpha-Me R8-octenyl-alanine olefin amino acid connected by an all-carbon crosslinker comprising one double bond
  MISC_FEATURE (9)..(16): Crosslink between residues
  MOD_RES (16)..(16): Alpha-Me S5-pentenyl-alanine olefin amino acid connected by an all-carbon crosslinker comprising one double bond
  C-term NH2
IWIAQALRAIADQFNAYYA

SEQ ID NO: 1667 - protein, 19 aa, Artificial Sequence
  Description of Artificial Sequence: Synthetic peptide
  N-term Ac
  MOD_RES (9)..(9): Alpha-Me R8-octenyl-alanine olefin amino acid connected by an all-carbon crosslinker comprising one double bond
  MISC_FEATURE (9)..(16): Crosslink between residues
  MOD_RES (16)..(16): Alpha-Me S5-pentenyl-alanine olefin amino acid connected by an all-carbon crosslinker comprising one double bond
  C-term NH2
IWIAQALRAAGDAFNAYYA

SEQ ID NO: 1668 - protein, 19 aa, Artificial Sequence
  Description of Artificial Sequence: Synthetic peptide
  N-term Ac
  MOD_RES (9)..(9): Alpha-Me R8-octenyl-alanine olefin amino acid connected by an all-carbon crosslinker comprising one double bond
  MISC_FEATURE (9)..(16): Crosslink between residues
  MOD_RES (16)..(16): Alpha-Me S5-pentenyl-alanine olefin amino acid connected by an all-carbon crosslinker comprising one double bond
  C-term NH2
IWIAQALRAAGDQFNAYYA

SEQ ID NO: 1669 - protein, 19 aa, Artificial Sequence
  Description of Artificial Sequence: Synthetic peptide
  N-term Ac
  MOD_RES (9)..(9): Alpha-Me R8-octenyl-alanine olefin amino acid connected by an all-carbon crosslinker comprising one double bond
  MISC_FEATURE (9)..(16): Crosslink between residues
  MOD_RES (16)..(16): Alpha-Me S5-pentenyl-alanine olefin amino acid connected by an all-carbon crosslinker comprising one double bond
  C-term NH2
IWIAQALRAFGDAFNAYYA

SEQ ID NO: 1670 - protein, 19 aa, Artificial Sequence
  Description of Artificial Sequence: Synthetic peptide
  N-term Ac
  MOD_RES (9)..(9): Alpha-Me R8-octenyl-alanine olefin amino acid connected by an all-carbon crosslinker comprising one double bond
  MISC_FEATURE (9)..(16): Crosslink between residues
  MOD_RES (16)..(16): Alpha-Me S5-pentenyl-alanine olefin amino acid connected by an all-carbon crosslinker comprising one double bond
  C-term NH2
IWIAQALRAFGDQFNAYYA

SEQ ID NO: 1671 - protein, 19 aa, Artificial Sequence
  Description of Artificial Sequence: Synthetic peptide
  N-term Ac
  MOD_RES (9)..(9): Alpha-Me R8-octenyl-alanine olefin amino acid connected by an all-carbon crosslinker comprising one double bond
  MISC_FEATURE (9)..(16): Crosslink between residues
  MOD_RES (16)..(16): Alpha-Me S5-pentenyl-alanine olefin amino acid connected by an all-carbon crosslinker comprising one double bond
  C-term NH2
IWFAQALRAIGDAFNAYYA

SEQ ID NO: 1672 - protein, 19 aa, Artificial Sequence
  Description of Artificial Sequence: Synthetic peptide
  N-term Ac
  MOD_RES (9)..(9): Alpha-Me R8-octenyl-alanine olefin amino acid connected by an all-carbon crosslinker comprising one double bond
  MISC_FEATURE (9)..(16): Crosslink between residues
  MOD_RES (16)..(16): Alpha-Me S5-pentenyl-alanine olefin amino acid connected by an all-carbon crosslinker comprising one double bond
  C-term NH2
IWFAQALRAIGDQFNAYYA

SEQ ID NO: 1673 - protein, 19 aa, Artificial Sequence
  Description of Artificial Sequence: Synthetic peptide
  N-term Ac
  MOD_RES (9)..(9): Alpha-Me R8-octenyl-alanine olefin amino acid connected by an all-carbon crosslinker comprising one double bond
  MISC_FEATURE (9)..(16): Crosslink between residues
  MOD_RES (16)..(16): Alpha-Me S5-pentenyl-alanine olefin amino acid connected by an all-carbon crosslinker comprising one double bond
  C-term NH2
IWIAQALAAIGDAFNAYYA

SEQ ID NO: 1674 - protein, 19 aa, Artificial Sequence
  Description of Artificial Sequence: Synthetic peptide
  N-term Ac
  MOD_RES (9)..(9): Alpha-Me R8-octenyl-alanine olefin amino acid connected by an all-carbon crosslinker comprising one double bond
  MISC_FEATURE (9)..(16): Crosslink between residues
  MOD_RES (16)..(16): Alpha-Me S5-pentenyl-alanine olefin amino acid connected by an all-carbon crosslinker comprising one double bond
  C-term NH2
IWIAQALRAIGNAFNAYYA

SEQ ID NO: 1675 - protein, 19 aa, Artificial Sequence
  Description of Artificial Sequence: Synthetic peptide
  N-term Ac
  MOD_RES (9)..(9): Alpha-Me R8-octenyl-alanine olefin amino acid connected by an all-carbon crosslinker comprising one double bond
  MISC_FEATURE (9)..(16): Crosslink between residues
  MOD_RES (16)..(16): Alpha-Me S5-pentenyl-alanine olefin amino acid connected by an all-carbon crosslinker comprising one double bond
  C-term NH2
IWIAQAARAIGDAFNAYYA

SEQ ID NO: 1676 - protein, 19 aa, Artificial Sequence
  Description of Artificial Sequence: Synthetic peptide
  N-term Ac
  MOD_RES (9)..(9): Alpha-Me R8-octenyl-alanine olefin amino acid connected by an all-carbon crosslinker comprising one double bond
  MISC_FEATURE (9)..(16): Crosslink between residues
  MOD_RES (16)..(16): Alpha-Me S5-pentenyl-alanine olefin amino acid connected by an all-carbon crosslinker comprising one double bond
  C-term NH2
IWIAQALRAIGDQFAAYYA

SEQ ID NO: 1677 - protein, 19 aa, Artificial Sequence
  Description of Artificial Sequence: Synthetic peptide
  N-term Ac
  MOD_RES (3)..(3): Cyclohexyl-Ala
  MOD_RES (9)..(9): Alpha-Me R8-octenyl-alanine olefin amino acid connected by an all-carbon crosslinker comprising one double bond
  MISC_FEATURE (9)..(16): Crosslink between residues
  MOD_RES (16)..(16): Alpha-Me S5-pentenyl-alanine olefin amino acid connected by an all-carbon crosslinker comprising one double bond
  C-term NH2
IWAAQALRAIGDAFNAYYA

SEQ ID NO: 1678 - protein, 19 aa, Artificial Sequence
  Description of Artificial Sequence: Synthetic peptide
  N-term Ac
  MOD_RES (3)..(3): hhLeu
  MOD_RES (9)..(9): Alpha-Me R8-octenyl-alanine olefin amino acid connected by an all-carbon crosslinker comprising one double bond
  MISC_FEATURE (9)..(16): Crosslink between residues
  MOD_RES (16)..(16): Alpha-Me S5-pentenyl-alanine olefin amino acid connected by an all-carbon crosslinker comprising one double bond
  C-term NH2
IWLAQALRAIGDAFNAYYA

SEQ ID NO: 1679 - protein, 19 aa, Artificial Sequence
  Description of Artificial Sequence: Synthetic peptide
  N-term Ac
  MOD_RES (3)..(3): Adamantyl-Gly
  MOD_RES (9)..(9): Alpha-Me R8-octenyl-alanine olefin amino acid connected by an all-carbon crosslinker comprising one double bond
  MISC_FEATURE (9)..(16): Crosslink between residues
  MOD_RES (16)..(16): Alpha-Me S5-pentenyl-alanine olefin amino acid connected by an all-carbon crosslinker comprising one double bond
  C-term NH2
IWGAQALRAIGDAFNAYYA

SEQ ID NO: 1680 - protein, 19 aa, Artificial Sequence
  Description of Artificial Sequence: Synthetic peptide
  N-term Ac
  MOD_RES (3)..(3): homo-Cyclohexyl-Ala
  MOD_RES (9)..(9): Alpha-Me R8-octenyl-alanine olefin amino acid connected by an all-carbon crosslinker comprising one double bond
  MISC_FEATURE (9)..(16): Crosslink between residues
  MOD_RES (16)..(16): Alpha-Me S5-pentenyl-alanine olefin amino acid connected by an all-carbon crosslinker comprising one double bond
  C-term NH2
IWAAQALRAIGDAFNAYYA

SEQ ID NO: 1681 - protein, 19 aa, Artificial Sequence
  Description of Artificial Sequence: Synthetic peptide
  N-term Ac
  MOD_RES (3)..(3): homo-Phe
  MOD_RES (9)..(9): Alpha-Me R8-octenyl-alanine olefin amino acid connected by an all-carbon crosslinker comprising one double bond
  MISC_FEATURE (9)..(16): Crosslink between residues
  MOD_RES (16)..(16): Alpha-Me S5-pentenyl-alanine olefin amino acid connected by an all-carbon crosslinker comprising one double bond
  C-term NH2
IWFAQALRAIGDAFNAYYA

SEQ ID NO: 1682 - protein, 19 aa, Artificial Sequence
  Description of Artificial Sequence: Synthetic peptide
  N-term Ac
  MOD_RES (3)..(3): Indanyl-Gly
  MOD_RES (9)..(9): Alpha-Me R8-octenyl-alanine olefin amino acid connected by an all-carbon crosslinker comprising one double bond
  MISC_FEATURE (9)..(16): Crosslink between residues
  MOD_RES (16)..(16): Alpha-Me S5-pentenyl-alanine olefin amino acid connected by an all-carbon crosslinker comprising one double bond
  C-term NH2
IWGAQALRAIGDAFNAYYA

SEQ ID NO: 1683 - protein, 19 aa, Artificial Sequence
  Description of Artificial Sequence: Synthetic peptide
  N-term Ac
  MOD_RES (3)..(3): Phe-4CF3
  MOD_RES (9)..(9): Alpha-Me R8-octenyl-alanine olefin amino acid connected by an all-carbon crosslinker comprising one double bond
  MISC_FEATURE (9)..(16): Crosslink between residues
  MOD_RES (16)..(16): Alpha-Me S5-pentenyl-alanine olefin amino acid connected by an all-carbon crosslinker comprising one double bond
  C-term NH2
IWFAQALRAIGDAFNAYYA

SEQ ID NO: 1684 - protein, 19 aa, Artificial Sequence
  Description of Artificial Sequence: Synthetic peptide
  N-term Ac
  MOD_RES (3)..(3): Phe-4tBu
  MOD_RES (9)..(9): Alpha-Me R8-octenyl-alanine olefin amino acid connected by an all-carbon crosslinker comprising one double bond
  MISC_FEATURE (9)..(16): Crosslink between residues
  MOD_RES (16)..(16): Alpha-Me S5-pentenyl-alanine olefin amino acid connected by an all-carbon crosslinker comprising one double bond
  C-term NH2
IWFAQALRAIGDAFNAYYA

SEQ ID NO: 1685 - protein, 19 aa, Artificial Sequence
  Description of Artificial Sequence: Synthetic peptide
  N-term Ac
  MOD_RES (3)..(3): 2-Naphthalanine
  MOD_RES (9)..(9): Alpha-Me R8-octenyl-alanine olefin amino acid connected by an all-carbon crosslinker comprising one double bond
  MISC_FEATURE (9)..(16): Crosslink between residues
  MOD_RES (16)..(16): Alpha-Me S5-pentenyl-alanine olefin amino acid connected by an all-carbon crosslinker comprising one double bond
  C-term NH2
IWAAQALRAIGDAFNAYYA

SEQ ID NO: 1686 - protein, 19 aa, Artificial Sequence
  Description of Artificial Sequence: Synthetic peptide
  N-term Ac
  MOD_RES (3)..(3): Bip
  MOD_RES (9)..(9): Alpha-Me R8-octenyl-alanine olefin amino acid connected by an all-carbon crosslinker comprising one double bond
  MISC_FEATURE (9)..(16): Crosslink between residues
  MOD_RES (16)..(16): Alpha-Me S5-pentenyl-alanine olefin amino acid connected by an all-carbon crosslinker comprising one double bond
  C-term NH2
IWXAQALRAIGDAFNAYYA

SEQ ID NO: 1687 - protein, 19 aa, Artificial Sequence
  Description of Artificial Sequence: Synthetic peptide
  N-term Ac
  MOD_RES (7)..(7): Cyclohexyl-Ala
  MOD_RES (9)..(9): Alpha-Me R8-octenyl-alanine olefin amino acid connected by an all-carbon crosslinker comprising one double bond
  MISC_FEATURE (9)..(16): Crosslink between residues
  MOD_RES (16)..(16): Alpha-Me S5-pentenyl-alanine olefin amino acid connected by an all-carbon crosslinker comprising one double bond
  C-term NH2
IWIAQAARAIGDAFNAYYA

SEQ ID NO: 1688 - protein, 19 aa, Artificial Sequence
  Description of Artificial Sequence: Synthetic peptide
  N-term Ac
  MOD_RES (7)..(7): hhLeu
  MOD_RES (9)..(9): Alpha-Me R8-octenyl-alanine olefin amino acid connected by an all-carbon crosslinker comprising one double bond
  MISC_FEATURE (9)..(16): Crosslink between residues
  MOD_RES (16)..(16): Alpha-Me S5-pentenyl-alanine olefin amino acid connected by an all-carbon crosslinker comprising one double bond
  C-term NH2
IWIAQALRAIGDAFNAYYA

SEQ ID NO: 1689 - protein, 19 aa, Artificial Sequence
  Description of Artificial Sequence: Synthetic peptide
  N-term Ac
  MOD_RES (7)..(7): Adamantyl-Gly
  MOD_RES (9)..(9): Alpha-Me R8-octenyl-alanine olefin amino acid connected by an all-carbon crosslinker comprising one double bond
  MISC_FEATURE (9)..(16): Crosslink between residues
  MOD_RES (16)..(16): Alpha-Me S5-pentenyl-alanine olefin amino acid connected by an all-carbon crosslinker comprising one double bond
  C-term NH2
IWIAQAGRAIGDAFNAYYA

SEQ ID NO: 1690 - protein, 19 aa, Artificial Sequence
  Description of Artificial Sequence: Synthetic peptide
  N-term Ac
  MOD_RES (7)..(7): homo-Cyclohexyl-Ala
  MOD_RES (9)..(9): Alpha-Me R8-octenyl-alanine olefin amino acid connected by an all-carbon crosslinker comprising one double bond
  MISC_FEATURE (9)..(16): Crosslink between residues
  MOD_RES (16)..(16): Alpha-Me S5-pentenyl-alanine olefin amino acid connected by an all-carbon crosslinker comprising one double bond
  C-term NH2
IWIAQAARAIGDAFNAYYA

SEQ ID NO: 1691 - protein, 19 aa, Artificial Sequence
  Description of Artificial Sequence: Synthetic peptide
  N-term Ac
  MOD_RES (7)..(7): Homo-Adamantyl glycine
  MOD_RES (9)..(9): Alpha-Me R8-octenyl-alanine olefin amino acid connected by an all-carbon crosslinker comprising one double bond
  MISC_FEATURE (9)..(16): Crosslink between residues
  MOD_RES (16)..(16): Alpha-Me S5-pentenyl-alanine olefin amino acid connected by an all-carbon crosslinker comprising one double bond
  C-term NH2
IWIAQAGRAIGDAFNAYYA

SEQ ID NO: 1692 - protein, 19 aa, Artificial Sequence
  Description of Artificial Sequence: Synthetic peptide
  N-term Ac
  MOD_RES (7)..(7): homo-Phe
  MOD_RES (9)..(9): Alpha-Me R8-octenyl-alanine olefin amino acid connected by an all-carbon crosslinker comprising one double bond
  MISC_FEATURE (9)..(16): Crosslink between residues
  MOD_RES (16)..(16): Alpha-Me S5-pentenyl-alanine olefin amino acid connected by an all-carbon crosslinker comprising one double bond
  C-term NH2
IWIAQAFRAIGDAFNAYYA

SEQ ID NO: 1693 - protein, 19 aa, Artificial Sequence
  Description of Artificial Sequence: Synthetic peptide
  N-term Ac
  MOD_RES (7)..(7): Indanyl-Gly
  MOD_RES (9)..(9): Alpha-Me R8-octenyl-alanine olefin amino acid connected by an all-carbon crosslinker comprising one double bond
  MISC_FEATURE (9)..(16): Crosslink between residues
  MOD_RES (16)..(16): Alpha-Me S5-pentenyl-alanine olefin amino acid connected by an all-carbon crosslinker comprising one double bond
  C-term NH2
IWIAQAGRAIGDAFNAYYA

SEQ ID NO: 1694 - protein, 19 aa, Artificial Sequence
  Description of Artificial Sequence: Synthetic peptide
  N-term Ac
  MOD_RES (7)..(7): Phe-4CF3
  MOD_RES (9)..(9): Alpha-Me R8-octenyl-alanine olefin amino acid connected by an all-carbon crosslinker comprising one double bond
  MISC_FEATURE (9)..(16): Crosslink between residues
  MOD_RES (16)..(16): Alpha-Me S5-pentenyl-alanine olefin amino acid connected by an all-carbon crosslinker comprising one double bond
  C-term NH2
IWIAQAFRAIGDAFNAYYA

SEQ ID NO: 1695 - protein, 19 aa, Artificial Sequence
  Description of Artificial Sequence: Synthetic peptide
  N-term Ac
  MOD_RES (7)..(7): Phe-4tBu
  MOD_RES (9)..(9): Alpha-Me R8-octenyl-alanine olefin amino acid connected by an all-carbon crosslinker comprising one double bond
  MISC_FEATURE (9)..(16): Crosslink between residues
  MOD_RES (16)..(16): Alpha-Me S5-pentenyl-alanine olefin amino acid connected by an all-carbon crosslinker comprising one double bond
  C-term NH2
IWIAQAFRAIGDAFNAYYA

SEQ ID NO: 1696 - protein, 19 aa, Artificial Sequence
  Description of Artificial Sequence: Synthetic peptide
  N-term Ac
  MOD_RES (7)..(7): 2-Naphthalanine
  MOD_RES (9)..(9): Alpha-Me R8-octenyl-alanine olefin amino acid connected by an all-carbon crosslinker comprising one double bond
  MISC_FEATURE (9)..(16): Crosslink between residues
  MOD_RES (16)..(16): Alpha-Me S5-pentenyl-alanine olefin amino acid connected by an all-carbon crosslinker comprising one double bond
  C-term NH2
IWIAQAARAIGDAFNAYYA

SEQ ID NO: 1697 - protein, 19 aa, Artificial Sequence
  Description of Artificial Sequence: Synthetic peptide
  N-term Ac
  MOD_RES (7)..(7): Bip
  MOD_RES (9)..(9): Alpha-Me R8-octenyl-alanine olefin amino acid connected by an all-carbon crosslinker comprising one double bond
  MISC_FEATURE (9)..(16): Crosslink between residues
  MOD_RES (16)..(16): Alpha-Me S5-pentenyl-alanine olefin amino acid connected by an all-carbon crosslinker comprising one double bond
  C-term NH2
IWIAQAXRAIGDAFNAYYA

SEQ ID NO: 1698 - protein, 19 aa, Artificial Sequence
  Description of Artificial Sequence: Synthetic peptide
  N-term Ac
  MOD_RES (9)..(9): Alpha-Me R8-octenyl-alanine olefin amino acid connected by an all-carbon crosslinker comprising one double bond
  MISC_FEATURE (9)..(16): Crosslink between residues
  MOD_RES (10)..(10): Cyclobutyl alanine
  MOD_RES (16)..(16): Alpha-Me S5-pentenyl-alanine olefin amino acid connected by an all-carbon crosslinker comprising one double bond
  C-term NH2
IWIAQALRAAGDAFNAYYA

SEQ ID NO: 1699 - protein, 19 aa, Artificial Sequence
  Description of Artificial Sequence: Synthetic peptide
  N-term Ac
  MOD_RES (9)..(9): Alpha-Me R8-octenyl-alanine olefin amino acid connected by an all-carbon crosslinker comprising one double bond
  MISC_FEATURE (9)..(16): Crosslink between residues
  MOD_RES (10)..(10): hLeu
  MOD_RES (16)..(16): Alpha-Me S5-pentenyl-alanine olefin amino acid connected by an all-carbon crosslinker comprising one double bond
  C-term NH2
IWIAQALRALGDAFNAYYA

SEQ ID NO: 1700 - protein, 19 aa, Artificial Sequence
  Description of Artificial Sequence: Synthetic peptide
  N-term Ac
  MOD_RES (9)..(9): Alpha-Me R8-octenyl-alanine olefin amino acid connected by an all-carbon crosslinker comprising one double bond
  MISC_FEATURE (9)..(16): Crosslink between residues
  MOD_RES (10)..(10): Cyclohexyl-Ala
  MOD_RES (16)..(16): Alpha-Me S5-pentenyl-alanine olefin amino acid connected by an all-carbon crosslinker comprising one double bond
  C-term NH2
IWIAQALRAAGDAFNAYYA

SEQ ID NO: 1701 - protein, 19 aa, Artificial Sequence
  Description of Artificial Sequence: Synthetic peptide
  N-term Ac
  MOD_RES (9)..(9): Alpha-Me R8-octenyl-alanine olefin amino acid connected by an all-carbon crosslinker comprising one double bond
  MISC_FEATURE (9)..(16): Crosslink between residues
  MOD_RES (10)..(10): Tert-Butyl-alanine
  MOD_RES (16)..(16): Alpha-Me S5-pentenyl-alanine olefin amino acid connected by an all-carbon crosslinker comprising one double bond
  C-term NH2
IWIAQALRAAGDAFNAYYA

SEQ ID NO: 1702 - protein, 19 aa, Artificial Sequence
  Description of Artificial Sequence: Synthetic peptide
  N-term Ac
  MOD_RES (9)..(9): Alpha-Me R8-octenyl-alanine olefin amino acid connected by an all-carbon crosslinker comprising one double bond
  MISC_FEATURE (9)..(16): Crosslink between residues
  MOD_RES (10)..(10): hhLeu
  MOD_RES (16)..(16): Alpha-Me S5-pentenyl-alanine olefin amino acid connected by an all-carbon crosslinker comprising one double bond
  C-term NH2
IWIAQALRALGDAFNAYYA

SEQ ID NO: 1703 - protein, 19 aa, Artificial Sequence
  Description of Artificial Sequence: Synthetic peptide
  N-term Ac
  MOD_RES (2)..(2): Alpha-Me-Trp
  MOD_RES (9)..(9): Alpha-Me R8-octenyl-alanine olefin amino acid connected by an all-carbon crosslinker comprising one double bond
  MISC_FEATURE (9)..(16): Crosslink between residues
  MOD_RES (16)..(16): Alpha-Me S5-pentenyl-alanine olefin amino acid connected by an all-carbon crosslinker comprising one double bond
  C-term NH2
IWIAQALRAIGDAFNAYYA

SEQ ID NO: 1704 - protein, 19 aa, Artificial Sequence
  Description of Artificial Sequence: Synthetic peptide
  N-term Ac
  MOD_RES (2)..(2): 2-aminoisobutyric acid
  MOD_RES (9)..(9): Alpha-Me R8-octenyl-alanine olefin amino acid connected by an all-carbon crosslinker comprising one double bond
  MISC_FEATURE (9)..(16): Crosslink between residues
  MOD_RES (16)..(16): Alpha-Me S5-pentenyl-alanine olefin amino acid connected by an all-carbon crosslinker comprising one double bond
  C-term NH2
IXIAQALRAIGDAFNAYYA

SEQ ID NO: 1705 - protein, 19 aa, Artificial Sequence
  Description of Artificial Sequence: Synthetic peptide
  N-term Ac
  MOD_RES (1)..(1): Alpha-Me-Leu
  MOD_RES (9)..(9): Alpha-Me R8-octenyl-alanine olefin amino acid connected by an all-carbon crosslinker comprising one double bond
  MISC_FEATURE (9)..(16): Crosslink between residues
  MOD_RES (16)..(16): Alpha-Me S5-pentenyl-alanine olefin amino acid connected by an all-carbon crosslinker comprising one double bond
  C-term NH2
LWIAQALRAIGDAFNAYYA

SEQ ID NO: 1706 - protein, 19 aa, Artificial Sequence
  Description of Artificial Sequence: Synthetic peptide
  N-term Ac
  MOD_RES (3)..(3): Alpha-Me-Leu
  MOD_RES (9)..(9): Alpha-Me R8-octenyl-alanine olefin amino acid connected by an all-carbon crosslinker comprising one double bond
  MISC_FEATURE (9)..(16): Crosslink between residues
  MOD_RES (16)..(16): Alpha-Me S5-pentenyl-alanine olefin amino acid connected by an all-carbon crosslinker comprising one double bond
  C-term NH2
IWLAQALRAIGDAFNAYYA

SEQ ID NO: 1707 - protein, 19 aa, Artificial Sequence
  Description of Artificial Sequence: Synthetic peptide
  N-term Ac
  MOD_RES (4)..(4): 2-aminoisobutyric acid
  MOD_RES (9)..(9): Alpha-Me R8-octenyl-alanine olefin amino acid connected by an all-carbon crosslinker comprising one double bond
  MISC_FEATURE (9)..(16): Crosslink between residues
  MOD_RES (12)..(12): Alpha-Me-Asp
  MOD_RES (16)..(16): Alpha-Me S5-pentenyl-alanine olefin amino acid connected by an all-carbon crosslinker comprising one double bond
  C-term NH2
IWIXQALRAIGDAFNAYYA

SEQ ID NO: 1708 - protein, 19 aa, Artificial Sequence
  Description of Artificial Sequence: Synthetic peptide
  N-term Ac
  MOD_RES (5)..(5): 2-aminoisobutyric acid
  MOD_RES (9)..(9): Alpha-Me R8-octenyl-alanine olefin amino acid connected by an all-carbon crosslinker comprising one double bond
  MISC_FEATURE (9)..(16): Crosslink between residues
  MOD_RES (16)..(16): Alpha-Me S5-pentenyl-alanine olefin amino acid connected by an all-carbon crosslinker comprising one double bond
  C-term NH2
IWIAXALRAIGDAFNAYYA

SEQ ID NO: 1709 - protein, 19 aa, Artificial Sequence
  Description of Artificial Sequence: Synthetic peptide
  N-term Ac
  MOD_RES (9)..(9): Alpha-Me R8-octenyl-alanine olefin amino acid connected by an all-carbon crosslinker comprising one double bond
  MISC_FEATURE (9)..(16): Crosslink between residues
  MOD_RES (12)..(12): Alpha-Me-Asp
  MOD_RES (16)..(16): Alpha-Me S5-pentenyl-alanine olefin amino acid connected by an all-carbon crosslinker comprising one double bond
  C-term NH2
IWIAQALRAIGDAFNAYYA

SEQ ID NO: 1710 - protein, 19 aa, Artificial Sequence
  Description of Artificial Sequence: Synthetic peptide
  N-term Ac
  MOD_RES (9)..(9): Alpha-Me R8-octenyl-alanine olefin amino acid connected by an all-carbon crosslinker comprising one double bond
  MISC_FEATURE (9)..(16): Crosslink between residues
  MOD_RES (16)..(16): Alpha-Me S5-pentenyl-alanine olefin amino acid connected by an all-carbon crosslinker comprising one double bond
  MOD_RES (18)..(18): Phe-4F
  C-term NH2
IWIAQALRAIGDAFNAYFA

SEQ ID NO: 1711 - protein, 19 aa, Artificial Sequence
  Description of Artificial Sequence: Synthetic peptide
  N-term Ac
  MOD_RES (3)..(3): Tert-Butyl-alanine
  MOD_RES (9)..(9): Alpha-Me R8-octenyl-alanine olefin amino acid connected by an all-carbon crosslinker comprising one double bond
  MISC_FEATURE (9)..(16): Crosslink between residues
  MOD_RES (16)..(16): Alpha-Me S5-pentenyl-alanine olefin amino acid connected by an all-carbon crosslinker comprising one double bond
  C-term NH2
IWAAQALRAIGDAFNAYYA

SEQ ID NO: 1712 - protein, 19 aa, Artificial Sequence
  Description of Artificial Sequence: Synthetic peptide
  N-term Ac
  MOD_RES (3)..(3): hLeu
  MOD_RES (9)..(9): Alpha-Me R8-octenyl-alanine olefin amino acid connected by an all-carbon crosslinker comprising one double bond
  MISC_FEATURE (9)..(16): Crosslink between residues
  MOD_RES (16)..(16): Alpha-Me S5-pentenyl-alanine olefin amino acid connected by an all-carbon crosslinker comprising one double bond
  C-term NH2
IWLAQALRAIGDAFNAYYA

SEQ ID NO: 1713 - protein, 19 aa, Artificial Sequence
  Description of Artificial Sequence: Synthetic peptide
  N-term Ac
  MOD_RES (3)..(3): Cyclohexyl-Gly
  MOD_RES (9)..(9): Alpha-Me R8-octenyl-alanine olefin amino acid connected by an all-carbon crosslinker comprising one double bond
  MISC_FEATURE (9)..(16): Crosslink between residues
  MOD_RES (16)..(16): Alpha-Me S5-pentenyl-alanine olefin amino acid connected by an all-carbon crosslinker comprising one double bond
  C-term NH2
IWGAQALRAIGDAFNAYYA

SEQ ID NO: 1714 - protein, 19 aa, Artificial Sequence
  Description of Artificial Sequence: Synthetic peptide
  N-term Ac
  MOD_RES (3)..(3): Ac6c
  MOD_RES (9)..(9): Alpha-Me R8-octenyl-alanine olefin amino acid connected by an all-carbon crosslinker comprising one double bond
  MISC_FEATURE (9)..(16): Crosslink between residues
  MOD_RES (16)..(16): Alpha-Me S5-pentenyl-alanine olefin amino acid connected by an all-carbon crosslinker comprising one double bond
  C-term NH2
IWXAQALRAIGDAFNAYYA

SEQ ID NO: 1715 - protein, 19 aa, Artificial Sequence
  Description of Artificial Sequence: Synthetic peptide
  N-term Ac
  MOD_RES (3)..(3): Ac5c
  MOD_RES (9)..(9): Alpha-Me R8-octenyl-alanine olefin amino acid connected by an all-carbon crosslinker comprising one double bond
  MISC_FEATURE (9)..(16): Crosslink between residues
  MOD_RES (16)..(16): Alpha-Me S5-pentenyl-alanine olefin amino acid connected by an all-carbon crosslinker comprising one double bond
  C-term NH2
IWXAQALRAIGDAFNAYYA

SEQ ID NO: 1716 - protein, 19 aa, Artificial Sequence
  Description of Artificial Sequence: Synthetic peptide
  N-term Ac
  MOD_RES (9)..(9): Alpha-Me R8-octenyl-alanine olefin amino acid connected by an all-carbon crosslinker comprising one double bond
  MISC_FEATURE (9)..(16): Crosslink between residues
  MOD_RES (16)..(16): Alpha-Me S5-pentenyl-alanine olefin amino acid connected by an all-carbon crosslinker comprising one double bond
  C-term NH2
EWIAAALRAIGDAFNAYYA

SEQ ID NO: 1717 - protein, 19 aa, Artificial Sequence
  Description of Artificial Sequence: Synthetic peptide
  N-term Ac
  MOD_RES (9)..(9): Alpha-Me R8-octenyl-alanine olefin amino acid connected by an all-carbon crosslinker comprising one double bond
  MISC_FEATURE (9)..(16): Crosslink between residues
  MOD_RES (16)..(16): Alpha-Me S5-pentenyl-alanine olefin amino acid connected by an all-carbon crosslinker comprising one double bond
  C-term NH2
RWIAAALRAIGDAFNAYYA

SEQ ID NO: 1718 - protein, 19 aa, Artificial Sequence
  Description of Artificial Sequence: Synthetic peptide
  N-term Ac
  MOD_RES (9)..(9): Alpha-Me R8-octenyl-alanine olefin amino acid connected by an all-carbon crosslinker comprising one double bond
  MISC_FEATURE (9)..(16): Crosslink between residues
  MOD_RES (16)..(16): Alpha-Me S5-pentenyl-alanine olefin amino acid connected by an all-carbon crosslinker comprising one double bond
  C-term NH2
KWIAAALRAIGDAFNAYYA

SEQ ID NO: 1719 - protein, 19 aa, Artificial Sequence
  Description of Artificial Sequence: Synthetic peptide
  N-term Ac
  MOD_RES (9)..(9): Alpha-Me R8-octenyl-alanine olefin amino acid connected by an all-carbon crosslinker comprising one double bond
  MISC_FEATURE (9)..(16): Crosslink between residues
  MOD_RES (16)..(16): Alpha-Me S5-pentenyl-alanine olefin amino acid connected by an all-carbon crosslinker comprising one double bond
  C-term NH2
HWIAAALRAIGDAFNAYYA

SEQ ID NO: 1720 - protein, 19 aa, Artificial Sequence
  Description of Artificial Sequence: Synthetic peptide
  N-term Ac
  MOD_RES (9)..(9): Alpha-Me R8-octenyl-alanine olefin amino acid connected by an all-carbon crosslinker comprising one double bond
  MISC_FEATURE (9)..(16): Crosslink between residues
  MOD_RES (16)..(16): Alpha-Me S5-pentenyl-alanine olefin amino acid connected by an all-carbon crosslinker comprising one double bond
  C-term NH2
SWIAAALRAIGDAFNAYYA

SEQ ID NO: 1721 - protein, 19 aa, Artificial Sequence
  Description of Artificial Sequence: Synthetic peptide
  N-term Ac
  MOD_RES (9)..(9): Alpha-Me R8-octenyl-alanine olefin amino acid connected by an all-carbon crosslinker comprising one double bond
  MISC_FEATURE (9)..(16): Crosslink between residues
  MOD_RES (16)..(16): Alpha-Me S5-pentenyl-alanine olefin amino acid connected by an all-carbon crosslinker comprising one double bond
  C-term NH2
QWIAAALRAIGDAFNAYYA

SEQ ID NO: 1722 - protein, 19 aa, Artificial Sequence
  Description of Artificial Sequence: Synthetic peptide
  N-term Ac
  MOD_RES (9)..(9): Alpha-Me R8-octenyl-alanine olefin amino acid connected by an all-carbon crosslinker comprising one double bond
  MISC_FEATURE (9)..(16): Crosslink between residues
  MOD_RES (16)..(16): Alpha-Me S5-pentenyl-alanine olefin amino acid connected by an all-carbon crosslinker comprising one double bond
  C-term NH2
AWIAAALRAIGDAFNAYYA

SEQ ID NO: 1723 - protein, 19 aa, Artificial Sequence
  Description of Artificial Sequence: Synthetic peptide
  N-term Ac
  MOD_RES (1)..(1): 2-aminoisobutyric acid
  MOD_RES (9)..(9): Alpha-Me R8-octenyl-alanine olefin amino acid connected by an all-carbon crosslinker comprising one double bond
  MISC_FEATURE (9)..(16): Crosslink between residues
  MOD_RES (16)..(16): Alpha-Me S5-pentenyl-alanine olefin amino acid connected by an all-carbon crosslinker comprising one double bond
  C-term NH2
XWIAAALRAIGDAFNAYYA

SEQ ID NO: 1724 - protein, 19 aa, Artificial Sequence
  Description of Artificial Sequence: Synthetic peptide
  N-term Ac
  MOD_RES (9)..(9): Alpha-Me R8-octenyl-alanine olefin amino acid connected by an all-carbon crosslinker comprising one double bond
  MISC_FEATURE (9)..(16): Crosslink between residues
  MOD_RES (16)..(16): Alpha-Me S5-pentenyl-alanine olefin amino acid connected by an all-carbon crosslinker comprising one double bond
  C-term NH2
FWIAAALRAIGDAFNAYYA

SEQ ID NO: 1725 - protein, 19 aa, Artificial Sequence
  Description of Artificial Sequence: Synthetic peptide
  N-term Ac
  MOD_RES (9)..(9): Alpha-Me R8-octenyl-alanine olefin amino acid connected by an all-carbon crosslinker comprising one double bond
  MISC_FEATURE (9)..(16): Crosslink between residues
  MOD_RES (16)..(16): Alpha-Me S5-pentenyl-alanine olefin amino acid connected by an all-carbon crosslinker comprising one double bond
  C-term NH2
IDIAAALRAIGDAFNAYYA

SEQ ID NO: 1726 - protein, 19 aa, Artificial Sequence
  Description of Artificial Sequence: Synthetic peptide
  N-term Ac
  MOD_RES (9)..(9): Alpha-Me R8-octenyl-alanine olefin amino acid connected by an all-carbon crosslinker comprising one double bond
  MISC_FEATURE (9)..(16): Crosslink between residues
  MOD_RES (16)..(16): Alpha-Me S5-pentenyl-alanine olefin amino acid connected by an all-carbon crosslinker comprising one double bond
  C-term NH2
IRIAAALRAIGDAFNAYYA

SEQ ID NO: 1727 - protein, 19 aa, Artificial Sequence
  Description of Artificial Sequence: Synthetic peptide
  N-term Ac
  MOD_RES (9)..(9): Alpha-Me R8-octenyl-alanine olefin amino acid connected by an all-carbon crosslinker comprising one double bond
  MISC_FEATURE (9)..(16): Crosslink between residues
  MOD_RES (16)..(16): Alpha-Me S5-pentenyl-alanine olefin amino acid connected by an all-carbon crosslinker comprising one double bond
  C-term NH2
IHIAAALRAIGDAFNAYYA

SEQ ID NO: 1728 - protein, 19 aa, Artificial Sequence
  Description of Artificial Sequence: Synthetic peptide
  N-term Ac
  MOD_RES (9)..(9): Alpha-Me R8-octenyl-alanine olefin amino acid connected by an all-carbon crosslinker comprising one double bond
  MISC_FEATURE (9)..(16): Crosslink between residues
  MOD_RES (16)..(16): Alpha-Me S5-pentenyl-alanine olefin amino acid connected by an all-carbon crosslinker comprising one double bond
  C-term NH2
ISIAAALRAIGDAFNAYYA

SEQ ID NO: 1729 - protein, 19 aa, Artificial Sequence
  Description of Artificial Sequence: Synthetic peptide
  N-term Ac
  MOD_RES (9)..(9): Alpha-Me R8-octenyl-alanine olefin amino acid connected by an all-carbon crosslinker comprising one double bond
  MISC_FEATURE (9)..(16): Crosslink between residues
  MOD_RES (16)..(16): Alpha-Me S5-pentenyl-alanine olefin amino acid connected by an all-carbon crosslinker comprising one double bond
  C-term NH2
INIAAALRAIGDAFNAYYA

SEQ ID NO: 1730 - protein, 19 aa, Artificial Sequence
  Description of Artificial Sequence: Synthetic peptide
  N-term Ac
  MOD_RES (9)..(9): Alpha-Me R8-octenyl-alanine olefin amino acid connected by an all-carbon crosslinker comprising one double bond
  MISC_FEATURE (9)..(16): Crosslink between residues
  MOD_RES (16)..(16): Alpha-Me S5-pentenyl-alanine olefin amino acid connected by an all-carbon crosslinker comprising one double bond
  C-term NH2
ILIAAALRAIGDAFNAYYA

SEQ ID NO: 1731 - protein, 19 aa, Artificial Sequence
  Description of Artificial Sequence: Synthetic peptide
  N-term Ac
  MOD_RES (9)..(9): Alpha-Me R8-octenyl-alanine olefin amino acid connected by an all-carbon crosslinker comprising one double bond
  MISC_FEATURE (9)..(16): Crosslink between residues
  MOD_RES (16)..(16): Alpha-Me S5-pentenyl-alanine olefin amino acid connected by an all-carbon crosslinker comprising one double bond
  C-term NH2
IFIAAALRAIGDAFNAYYA

SEQ ID NO: 1732 - protein, 19 aa, Artificial Sequence
  Description of Artificial Sequence: Synthetic peptide
  N-term Ac
  MOD_RES (2)..(2): 2-Naphthalanine
  MOD_RES (9)..(9): Alpha-Me R8-octenyl-alanine olefin amino acid connected by an all-carbon crosslinker comprising one double bond
  MISC_FEATURE (9)..(16): Crosslink between residues
  MOD_RES (16)..(16): Alpha-Me S5-pentenyl-alanine olefin amino acid connected by an all-carbon crosslinker comprising one double bond
  C-term NH2
IAIAAALRAIGDAFNAYYA

SEQ ID NO: 1733 - protein, 19 aa, Artificial Sequence
  Description of Artificial Sequence: Synthetic peptide
  N-term Ac
  MOD_RES (9)..(9): Alpha-Me R8-octenyl-alanine olefin amino acid connected by an all-carbon crosslinker comprising one double bond
  MISC_FEATURE (9)..(16): Crosslink between residues
  MOD_RES (16)..(16): Alpha-Me S5-pentenyl-alanine olefin amino acid connected by an all-carbon crosslinker comprising one double bond
  C-term NH2
IWISAALRAIGDAFNAYYA

SEQ ID NO: 1734 - protein, 19 aa, Artificial Sequence
  Description of Artificial Sequence: Synthetic peptide
  N-term Ac
  MOD_RES (9)..(9): Alpha-Me R8-octenyl-alanine olefin amino acid connected by an all-carbon crosslinker comprising one double bond
  MISC_FEATURE (9)..(16): Crosslink between residues
  MOD_RES (16)..(16): Alpha-Me S5-pentenyl-alanine olefin amino acid connected by an all-carbon crosslinker comprising one double bond
  C-term NH2
IWILAALRAIGDAFNAYYA

SEQ ID NO: 1735 - protein, 19 aa, Artificial Sequence
  Description of Artificial Sequence: Synthetic peptide
  N-term Ac
  MOD_RES (9)..(9): Alpha-Me R8-octenyl-alanine olefin amino acid connected by an all-carbon crosslinker comprising one double bond
  MISC_FEATURE (9)..(16): Crosslink between residues
  MOD_RES (16)..(16): Alpha-Me S5-pentenyl-alanine olefin amino acid connected by an all-carbon crosslinker comprising one double bond
  C-term NH2
IWIFAALRAIGDAFNAYYA

SEQ ID NO: 1736 - protein, 19 aa, Artificial Sequence
  Description of Artificial Sequence: Synthetic peptide
  N-term Ac
  MOD_RES (9)..(9): Alpha-Me R8-octenyl-alanine olefin amino acid connected by an all-carbon crosslinker comprising one double bond
  MISC_FEATURE (9)..(16): Crosslink between residues
  MOD_RES (16)..(16): Alpha-Me S5-pentenyl-alanine olefin amino acid connected by an all-carbon crosslinker comprising one double bond
  C-term NH2
IWIALALRAIGDAFNAYYA

SEQ ID NO: 1737 - protein, 19 aa, Artificial Sequence
  Description of Artificial Sequence: Synthetic peptide
  N-term Ac
  MOD_RES (9)..(9): Alpha-Me R8-octenyl-alanine olefin amino acid connected by an all-carbon crosslinker comprising one double bond
  MISC_FEATURE (9)..(16): Crosslink between residues
  MOD_RES (16)..(16): Alpha-Me S5-pentenyl-alanine olefin amino acid connected by an all-carbon crosslinker comprising one double bond
  C-term NH2
IWIAAALKAIGDAFNAYYA

SEQ ID NO: 1738 - protein, 19 aa, Artificial Sequence
  Description of Artificial Sequence: Synthetic peptide
  N-term Ac
  MOD_RES (9)..(9): Alpha-Me R8-octenyl-alanine olefin amino acid connected by an all-carbon crosslinker comprising one double bond
  MISC_FEATURE (9)..(16): Crosslink between residues
  MOD_RES (11)..(11): Abu
  MOD_RES (16)..(16): Alpha-Me S5-pentenyl-alanine olefin amino acid connected by an all-carbon crosslinker comprising one double bond
  C-term NH2
IWIAAALRAIXDAFNAYYA

SEQ ID NO: 1739 - protein, 19 aa, Artificial Sequence
  Description of Artificial Sequence: Synthetic peptide
  N-term Ac
  MOD_RES (9)..(9): Alpha-Me R8-octenyl-alanine olefin amino acid connected by an all-carbon crosslinker comprising one double bond
  MISC_FEATURE (9)..(16): Crosslink between residues
  MOD_RES (16)..(16): Alpha-Me S5-pentenyl-alanine olefin amino acid connected by an all-carbon crosslinker comprising one double bond
  C-term NH2
IWIAAALRAIVDAFNAYYA

SEQ ID NO: 1740 - protein, 19 aa, Artificial Sequence
  Description of Artificial Sequence: Synthetic peptide
  N-term Ac
  MOD_RES (9)..(9): Alpha-Me R8-octenyl-alanine olefin amino acid connected by an all-carbon crosslinker comprising one double bond
  MISC_FEATURE (9)..(16): Crosslink between residues
  MOD_RES (16)..(16): Alpha-Me S5-pentenyl-alanine olefin amino acid connected by an all-carbon crosslinker comprising one double bond
  C-term NH2
IWIAAALRAIGEAFNAYYA

SEQ ID NO: 1741 - protein, 19 aa, Artificial Sequence
  Description of Artificial Sequence: Synthetic peptide
  N-term Ac
  MOD_RES (9)..(9): Alpha-Me R8-octenyl-alanine olefin amino acid connected by an all-carbon crosslinker comprising one double bond
  MISC_FEATURE (9)..(16): Crosslink between residues
  MOD_RES (16)..(16): Alpha-Me S5-pentenyl-alanine olefin amino acid connected by an all-carbon crosslinker comprising one double bond
  C-term NH2
IWIAAALRAIGDAGNAYYA

SEQ ID NO: 1742 - protein, 19 aa, Artificial Sequence
  Description of Artificial Sequence: Synthetic peptide
  N-term Ac
  MOD_RES (9)..(9): Alpha-Me R8-octenyl-alanine olefin amino acid connected by an all-carbon crosslinker comprising one double bond
  MISC_FEATURE (9)..(16): Crosslink between residues
  MOD_RES (16)..(16): Alpha-Me S5-pentenyl-alanine olefin amino acid connected by an all-carbon crosslinker comprising one double bond
  C-term NH2
IWIAQALRAIGDAWNAYYA

SEQ ID NO: 1743 - protein, 19 aa, Artificial Sequence
  Description of Artificial Sequence: Synthetic peptide
  N-term Ac
  MOD_RES (9)..(9): Alpha-Me R8-octenyl-alanine olefin amino acid connected by an all-carbon crosslinker comprising one double bond
  MISC_FEATURE (9)..(16): Crosslink between residues
  MOD_RES (14)..(14): homo-Phe
  MOD_RES (16)..(16): Alpha-Me S5-pentenyl-alanine olefin amino acid connected by an all-carbon crosslinker comprising one double bond
  C-term NH2
IWIAQALRAIGDAFNAYYA

SEQ ID NO: 1744 - protein, 19 aa, Artificial Sequence
  Description of Artificial Sequence: Synthetic peptide
  N-term Ac
  MOD_RES (9)..(9): Alpha-Me R8-octenyl-alanine olefin amino acid connected by an all-carbon crosslinker comprising one double bond
  MISC_FEATURE (9)..(16): Crosslink between residues
  MOD_RES (14)..(14): Phe-4CF3
  MOD_RES (16)..(16): Alpha-Me S5-pentenyl-alanine olefin amino acid connected by an all-carbon crosslinker comprising one double bond
  C-term NH2
IWIAQALRAIGDAFNAYYA

SEQ ID NO: 1745 - protein, 19 aa, Artificial Sequence
  Description of Artificial Sequence: Synthetic peptide
  N-term Ac
  MOD_RES (9)..(9): Alpha-Me R8-octenyl-alanine olefin amino acid connected by an all-carbon crosslinker comprising one double bond
  MISC_FEATURE (9)..(16): Crosslink between residues
  MOD_RES (14)..(14): Phe-4tBu
  MOD_RES (16)..(16): Alpha-Me S5-pentenyl-alanine olefin amino acid connected by an all-carbon crosslinker comprising one double bond
  C-term NH2
IWIAQALRAIGDAFNAYYA

SEQ ID NO: 1746 - protein, 19 aa, Artificial Sequence
  Description of Artificial Sequence: Synthetic peptide
  N-term Ac
  MOD_RES (9)..(9): Alpha-Me R8-octenyl-alanine olefin amino acid connected by an all-carbon crosslinker comprising one double bond
  MISC_FEATURE (9)..(16): Crosslink between residues
  MOD_RES (14)..(14): 2-Naphthalanine
  MOD_RES (16)..(16): Alpha-Me S5-pentenyl-alanine olefin amino acid connected by an all-carbon crosslinker comprising one double bond
  C-term NH2
IWIAQALRAIGDAANAYYA

SEQ ID NO: 1747 - protein, 19 aa, Artificial Sequence
  Description of Artificial Sequence: Synthetic peptide
  N-term Ac
  MOD_RES (9)..(9): Alpha-Me R8-octenyl-alanine olefin amino acid connected by an all-carbon crosslinker comprising one double bond
  MISC_FEATURE (9)..(16): Crosslink between residues
  MOD_RES (14)..(14): Bip
  MOD_RES (16)..(16): Alpha-Me S5-pentenyl-alanine olefin amino acid connected by an all-carbon crosslinker comprising one double bond
  C-term NH2
IWIAQALRAIGDAXNAYYA

SEQ ID NO: 1748 - protein, 19 aa, Artificial Sequence
  Description of Artificial Sequence: Synthetic peptide
  N-term Ac
  MOD_RES (9)..(9): Alpha-Me R8-octenyl-alanine olefin amino acid connected by an all-carbon crosslinker comprising one double bond
  MISC_FEATURE (9)..(16): Crosslink between residues
  MOD_RES (16)..(16): Alpha-Me S5-pentenyl-alanine olefin amino acid connected by an all-carbon crosslinker comprising one double bond
  C-term NH2
IWIAAALRAIGDAFDAYYA

SEQ ID NO: 1749 - protein, 19 aa, Artificial Sequence
  Description of Artificial Sequence: Synthetic peptide
  N-term Ac
  MOD_RES (9)..(9): Alpha-Me R8-octenyl-alanine olefin amino acid connected by an all-carbon crosslinker comprising one double bond
  MISC_FEATURE (9)..(16): Crosslink between residues
  MOD_RES (16)..(16): Alpha-Me S5-pentenyl-alanine olefin amino acid connected by an all-carbon crosslinker comprising one double bond
  C-term NH2
IWIAAALRAIGDAFEAYYA

SEQ ID NO: 1750 - protein, 19 aa, Artificial Sequence
  Description of Artificial Sequence: Synthetic peptide
  N-term Ac
  MOD_RES (9)..(9): Alpha-Me R8-octenyl-alanine olefin amino acid connected by an all-carbon crosslinker comprising one double bond
  MISC_FEATURE (9)..(16): Crosslink between residues
  MOD_RES (16)..(16): Alpha-Me S5-pentenyl-alanine olefin amino acid connected by an all-carbon crosslinker comprising one double bond
  C-term NH2
IWIAAALRAIGDAFQAYYA

SEQ ID NO: 1751 - protein, 19 aa, Artificial Sequence
  Description of Artificial Sequence: Synthetic peptide
  N-term Ac
  MOD_RES (9)..(9): Alpha-Me R8-octenyl-alanine olefin amino acid connected by an all-carbon crosslinker comprising one double bond
  MISC_FEATURE (9)..(16): Crosslink between residues
  MOD_RES (16)..(16): Alpha-Me S5-pentenyl-alanine olefin amino acid connected by an all-carbon crosslinker comprising one double bond
  C-term NH2
IWIAAALRAIGDAFSAYYA

SEQ ID NO: 1752 - protein, 19 aa, Artificial Sequence
  Description of Artificial Sequence: Synthetic peptide
  N-term Ac
  MOD_RES (9)..(9): Alpha-Me R8-octenyl-alanine olefin amino acid connected by an all-carbon crosslinker comprising one double bond
  MISC_FEATURE (9)..(16): Crosslink between residues
  MOD_RES (16)..(16): Alpha-Me S5-pentenyl-alanine olefin amino acid connected by an all-carbon crosslinker comprising one double bond
  C-term NH2
IWIAAALRAIGDAFHAYYA

SEQ ID NO: 1753 - protein, 19 aa, Artificial Sequence
  Description of Artificial Sequence: Synthetic peptide
  N-term Ac
  MOD_RES (9)..(9): Alpha-Me R8-octenyl-alanine olefin amino acid connected by an all-carbon crosslinker comprising one double bond
  MISC_FEATURE (9)..(16): Crosslink between residues
  MOD_RES (16)..(16): Alpha-Me S5-pentenyl-alanine olefin amino acid connected by an all-carbon crosslinker comprising one double bond
  C-term NH2
IWIAAALRAIGDAFNALYA

SEQ ID NO: 1754 - protein, 19 aa, Artificial Sequence
  Description of Artificial Sequence: Synthetic peptide
  N-term Ac
  MOD_RES (9)..(9): Alpha-Me R8-octenyl-alanine olefin amino acid connected by an all-carbon crosslinker comprising one double bond
  MISC_FEATURE (9)..(16): Crosslink between residues
  MOD_RES (16)..(16): Alpha-Me S5-pentenyl-alanine olefin amino acid connected by an all-carbon crosslinker comprising one double bond
  C-term NH2
IWIAQALRAIGDAFNAYAA

SEQ ID NO: 1755 - protein, 19 aa, Artificial Sequence
  Description of Artificial Sequence: Synthetic peptide
  N-term Ac
  MOD_RES (9)..(9): Alpha-Me R8-octenyl-alanine olefin amino acid connected by an all-carbon crosslinker comprising one double bond
  MISC_FEATURE (9)..(16): Crosslink between residues
  MOD_RES (16)..(16): Alpha-Me S5-pentenyl-alanine olefin amino acid connected by an all-carbon crosslinker comprising one double bond
  C-term NH2
IWIAQALRAIGDAFNAYLA

SEQ ID NO: 1756 - protein, 19 aa, Artificial Sequence
  Description of Artificial Sequence: Synthetic peptide
  N-term Ac
  MOD_RES (9)..(9): Alpha-Me R8-octenyl-alanine olefin amino acid connected by an all-carbon crosslinker comprising one double bond
  MISC_FEATURE (9)..(16): Crosslink between residues
  MOD_RES (16)..(16): Alpha-Me S5-pentenyl-alanine olefin amino acid connected by an all-carbon crosslinker comprising one double bond
  MOD_RES (18)..(18): Cyclohexyl-Ala
  C-term NH2
IWIAQALRAIGDAFNAYAA

SEQ ID NO: 1757 - protein, 19 aa, Artificial Sequence
  Description of Artificial Sequence: Synthetic peptide
  N-term Ac
  MOD_RES (9)..(9): Alpha-Me R8-octenyl-alanine olefin amino acid connected by an all-carbon crosslinker comprising one double bond
  MISC_FEATURE (9)..(16): Crosslink between residues
  MOD_RES (16)..(16): Alpha-Me S5-pentenyl-alanine olefin amino acid connected by an all-carbon crosslinker comprising one double bond
  MOD_RES (18)..(18): homo-Phe
  C-term NH2
IWIAQALRAIGDAFNAYFA

SEQ ID NO: 1758 - protein, 19 aa, Artificial Sequence
  Description of Artificial Sequence: Synthetic peptide
  N-term Ac
  MOD_RES (9)..(9): Alpha-Me R8-octenyl-alanine olefin amino acid connected by an all-carbon crosslinker comprising one double bond
  MISC_FEATURE (9)..(16): Crosslink between residues
  MOD_RES (16)..(16): Alpha-Me S5-pentenyl-alanine olefin amino acid connected by an all-carbon crosslinker comprising one double bond
  C-term NH2
IWIAQALRAIGDAFNAYWA

SEQ ID NO: 1759 - protein, 19 aa, Artificial Sequence
  Description of Artificial Sequence: Synthetic peptide
  N-term Ac
  MOD_RES (9)..(9): Alpha-Me R8-octenyl-alanine olefin amino acid connected by an all-carbon crosslinker comprising one double bond
  MISC_FEATURE (9)..(16): Crosslink between residues
  MOD_RES (16)..(16): Alpha-Me S5-pentenyl-alanine olefin amino acid connected by an all-carbon crosslinker comprising one double bond
  MOD_RES (18)..(18): 2-Naphthalanine
  C-term NH2
IWIAQALRAIGDAFNAYAA

SEQ ID NO: 1760 - protein, 19 aa, Artificial Sequence
  Description of Artificial Sequence: Synthetic peptide
  N-term Ac
  MOD_RES (9)..(9): Alpha-Me R8-octenyl-alanine olefin amino acid connected by an all-carbon crosslinker comprising one double bond
  MISC_FEATURE (9)..(16): Crosslink between residues
  MOD_RES (16)..(16): Alpha-Me S5-pentenyl-alanine olefin amino acid connected by an all-carbon crosslinker comprising one double bond
  C-term NH2
IWIAAALRAIGDAFNAYYD

SEQ ID NO: 1761 - protein, 19 aa, Artificial Sequence
  Description of Artificial Sequence: Synthetic peptide
  N-term Ac
  MOD_RES (9)..(9): Alpha-Me R8-octenyl-alanine olefin amino acid connected by an all-carbon crosslinker comprising one double bond
  MISC_FEATURE (9)..(16): Crosslink between residues
  MOD_RES (16)..(16): Alpha-Me S5-pentenyl-alanine olefin amino acid connected by an all-carbon crosslinker comprising one double bond
  C-term NH2
IWIAAALRAIGDAFNAYYE

SEQ ID NO: 1762 - protein, 19 aa, Artificial Sequence
  Description of Artificial Sequence: Synthetic peptide
  N-term Ac
  MOD_RES (9)..(9): Alpha-Me R8-octenyl-alanine olefin amino acid connected by an all-carbon crosslinker comprising one double bond
  MISC_FEATURE (9)..(16): Crosslink between residues
  MOD_RES (16)..(16): Alpha-Me S5-pentenyl-alanine olefin amino acid connected by an all-carbon crosslinker comprising one double bond
  C-term NH2
IWIAAALRAIGDAFNAYYQ

SEQ ID NO: 1763 - protein, 19 aa, Artificial Sequence
  Description of Artificial Sequence: Synthetic peptide
  N-term Ac
  MOD_RES (9)..(9): Alpha-Me R8-octenyl-alanine olefin amino acid connected by an all-carbon crosslinker comprising one double bond
  MISC_FEATURE (9)..(16): Crosslink between residues
  MOD_RES (16)..(16): Alpha-Me S5-pentenyl-alanine olefin amino acid connected by an all-carbon crosslinker comprising one double bond
  C-term NH2
IWIAAALRAIGDAFNAYYS

SEQ ID NO: 1764 - protein, 19 aa, Artificial Sequence
  Description of Artificial Sequence: Synthetic peptide
  N-term Ac
  MOD_RES (9)..(9): Alpha-Me R8-octenyl-alanine olefin amino acid connected by an all-carbon crosslinker comprising one double bond
  MISC_FEATURE (9)..(16): Crosslink between residues
  MOD_RES (16)..(16): Alpha-Me S5-pentenyl-alanine olefin amino acid connected by an all-carbon crosslinker comprising one double bond
  C-term NH2
IWIAAALRAIGDAFNAYYH

SEQ ID NO: 1765 - protein, 19 aa, Artificial Sequence
  Description of Artificial Sequence: Synthetic peptide
  N-term Ac
  MOD_RES (9)..(9): Alpha-Me R8-octenyl-alanine olefin amino acid connected by an all-carbon crosslinker comprising one double bond
  MISC_FEATURE (9)..(16): Crosslink between residues
  MOD_RES (16)..(16): Alpha-Me S5-pentenyl-alanine olefin amino acid connected by an all-carbon crosslinker comprising one double bond
  C-term NH2
IWIAAALRAIGDAFNAYYR

SEQ ID NO: 1766 - protein, 19 aa, Artificial Sequence
  Description of Artificial Sequence: Synthetic peptide
  N-term Ac
  MOD_RES (9)..(9): Alpha-Me R8-octenyl-alanine olefin amino acid connected by an all-carbon crosslinker comprising one double bond
  MISC_FEATURE (9)..(16): Crosslink between residues
  MOD_RES (16)..(16): Alpha-Me S5-pentenyl-alanine olefin amino acid connected by an all-carbon crosslinker comprising one double bond
  C-term NH2
IWIAAALRAIGDAFNAYYK

SEQ ID NO: 1767 - protein, 19 aa, Artificial Sequence
  Description of Artificial Sequence: Synthetic peptide
  N-term Ac
  MOD_RES (7)..(7): Alpha-Me-Leu
  MOD_RES (9)..(9): Alpha-Me R8-octenyl-alanine olefin amino acid connected by an all-carbon crosslinker comprising one double bond
  MISC_FEATURE (9)..(16): Crosslink between residues
  MOD_RES (16)..(16): Alpha-Me S5-pentenyl-alanine olefin amino acid connected by an all-carbon crosslinker comprising one double bond
  C-term NH2
IWIAQALRAIGDAFNAYYA

SEQ ID NO: 1768 - protein, 19 aa, Artificial Sequence
  Description of Artificial Sequence: Synthetic peptide
  N-term Ac
  MOD_RES (9)..(9): Alpha-Me R8-octenyl-alanine olefin amino acid connected by an all-carbon crosslinker comprising one double bond
  MISC_FEATURE (9)..(16): Crosslink between residues
  MOD_RES (12)..(12): Alpha-Me-Asp
  MOD_RES (16)..(16): Alpha-Me S5-pentenyl-alanine olefin amino acid connected by an all-carbon crosslinker comprising one double bond
  C-term NH2
IWIAQALRAIGDAFNAYYA

SEQ ID NO: 1769 - protein, 19 aa, Artificial Sequence
  Description of Artificial Sequence: Synthetic peptide
  N-term Ac
  MOD_RES (9)..(9): Alpha-Me R8-octenyl-alanine olefin amino acid connected by an all-carbon crosslinker comprising one double bond
  MISC_FEATURE (9)..(16): Crosslink between residues
  MOD_RES (16)..(16): Alpha-Me S5-pentenyl-alanine olefin amino acid connected by an all-carbon crosslinker comprising one double bond
  MOD_RES (17)..(17): Phe-4F
  C-term NH2
IWIAQALRAIGDAFNAFYA

SEQ ID NO: 1770 - protein, 19 aa, Artificial Sequence
  Description of Artificial Sequence: Synthetic peptide
  N-term Ac
  MOD_RES (9)..(9): Alpha-Me R8-octenyl-alanine olefin amino acid connected by an all-carbon crosslinker comprising one double bond
  MISC_FEATURE (9)..(16): Crosslink between residues
  MOD_RES (16)..(16): Alpha-Me S5-pentenyl-alanine olefin amino acid connected by an all-carbon crosslinker comprising one double bond
  MOD_RES (19)..(19): 2-aminoisobutyric acid
  C-term NH2
IWIAQALRAIGDAFNAYYX

SEQ ID NO: 1771 - protein, 19 aa, Artificial Sequence
  Description of Artificial Sequence: Synthetic peptide
  N-term Ac
  MOD_RES (8)..(8): Cit
  MOD_RES (9)..(9): Alpha-Me R8-octenyl-alanine olefin amino acid connected by an all-carbon crosslinker comprising one double bond
  MISC_FEATURE (9)..(16): Crosslink between residues
  MOD_RES (16)..(16): Alpha-Me S5-pentenyl-alanine olefin amino acid connected by an all-carbon crosslinker comprising one double bond
  C-term NH2
IWIAQAAXAIGDAFNAYYA

SEQ ID NO: 1772 - protein, 19 aa, Artificial Sequence
  Description of Artificial Sequence: Synthetic peptide
  N-term Ac
  MOD_RES (8)..(8): Cit
  MOD_RES (9)..(9): Alpha-Me R8-octenyl-alanine olefin amino acid connected by an all-carbon crosslinker comprising one double bond
  MISC_FEATURE (9)..(16): Crosslink between residues
  MOD_RES (16)..(16): Alpha-Me S5-pentenyl-alanine olefin amino acid connected by an all-carbon crosslinker comprising one double bond
  C-term NH2
IWIAQALXAIGNAFNAYYA

SEQ ID NO: 1773 - protein, 19 aa, Artificial Sequence
  Description of Artificial Sequence: Synthetic peptide
  N-term Ac
  MOD_RES (8)..(8): Cit
  MOD_RES (9)..(9): Alpha-Me R8-octenyl-alanine olefin amino acid connected by an all-carbon crosslinker comprising one double bond
  MISC_FEATURE (9)..(16): Crosslink between residues
  MOD_RES (16)..(16): Alpha-Me S5-pentenyl-alanine olefin amino acid connected by an all-carbon crosslinker comprising one double bond
  C-term NH2
IWIAQALXAIGDAANAYYA

SEQ ID NO: 1774 - protein, 19 aa, Artificial Sequence
  Description of Artificial Sequence: Synthetic peptide
  N-term Ac
  MOD_RES (8)..(8): Cit
  MOD_RES (9)..(9): Alpha-Me R8-octenyl-alanine olefin amino acid connected by an all-carbon crosslinker comprising one double bond
  MISC_FEATURE (9)..(16): Crosslink between residues
  MOD_RES (16)..(16): Alpha-Me S5-pentenyl-alanine olefin amino acid connected by an all-carbon crosslinker comprising one double bond
  C-term NH2
IWIAQALXAIGDAVNAYYA

SEQ ID NO: 1775 - protein, 19 aa, Artificial Sequence
  Description of Artificial Sequence: Synthetic peptide
  N-term Ac
  MOD_RES (9)..(9): Alpha-Me R8-octenyl-alanine olefin amino acid connected by an all-carbon crosslinker comprising one double bond
  MISC_FEATURE (9)..(16): Crosslink between residues
  MOD_RES (16)..(16): Alpha-Me S5-pentenyl-alanine olefin amino acid connected by an all-carbon crosslinker comprising one double bond
  C-term NH2
IWIAQALRAIGDAFNAAYA

SEQ ID NO: 1776 - protein, 19 aa, Artificial Sequence
  Description of Artificial Sequence: Synthetic peptide
  N-term Ac
  MOD_RES (9)..(9): Alpha-Me R8-octenyl-alanine olefin amino acid connected by an all-carbon crosslinker comprising one double bond
  MISC_FEATURE (9)..(16): Crosslink between residues
  MOD_RES (10)..(10): hLeu
  MOD_RES (16)..(16): Alpha-Me S5-pentenyl-alanine olefin amino acid connected by an all-carbon crosslinker comprising one double bond
  MOD_RES (17)..(17): Phe-4F
  C-term NH2
IWIAQALRALGDAFNAFYA

SEQ ID NO: 1777 - protein, 19 aa, Artificial Sequence
  Description of Artificial Sequence: Synthetic peptide
  N-term Ac
  MOD_RES (9)..(9): Alpha-Me R8-octenyl-alanine olefin amino acid connected by an all-carbon crosslinker comprising one double bond
  MISC_FEATURE (9)..(16): Crosslink between residues
  MOD_RES (10)..(10): hLeu
  MOD_RES (16)..(16): Alpha-Me S5-pentenyl-alanine olefin amino acid connected by an all-carbon crosslinker comprising one double bond
  MOD_RES (18)..(18): Phe-4F
  C-term NH2
IWIAQALRALGDAFNAYFA

SEQ ID NO: 1778 - protein, 19 aa, Artificial Sequence
  Description of Artificial Sequence: Synthetic peptide
  N-term Ac
  MOD_RES (9)..(9): Alpha-Me R8-octenyl-alanine olefin amino acid connected by an all-carbon crosslinker comprising one double bond
  MISC_FEATURE (9)..(16): Crosslink between residues
  MOD_RES (10)..(10): hLeu
  MOD_RES (16)..(16): Alpha-Me S5-pentenyl-alanine olefin amino acid connected by an all-carbon crosslinker comprising one double bond
  MOD_RES (17)..(17): Phe-4F
  MOD_RES (18)..(18): Phe-4F
  C-term NH2
IWIAQALRALGDAFNAFFA

SEQ ID NO: 1779 - protein, 19 aa, Artificial Sequence
  Description of Artificial Sequence: Synthetic peptide
  N-term Ac
  MOD_RES (9)..(9): Alpha-Me R8-octenyl-alanine olefin amino acid connected by an all-carbon crosslinker comprising one double bond
  MISC_FEATURE (9)..(16): Crosslink between residues
  MOD_RES (10)..(10): hLeu
  MOD_RES (16)..(16): Alpha-Me S5-pentenyl-alanine olefin amino acid connected by an all-carbon crosslinker comprising one double bond
  MOD_RES (18)..(18): Phe-4F
  C-term NH2
AWIAAALRALGDAFNAYFA

SEQ ID NO: 1780 - protein, 19 aa, Artificial Sequence
  Description of Artificial Sequence: Synthetic peptide
  N-term Ac
  MOD_RES (9)..(9): Alpha-Me R8-octenyl-alanine olefin amino acid connected by an all-carbon crosslinker comprising one double bond
  MISC_FEATURE (9)..(16): Crosslink between residues
  MOD_RES (10)..(10): hLeu
  MOD_RES (16)..(16): Alpha-Me S5-pentenyl-alanine olefin amino acid connected by an all-carbon crosslinker comprising one double bond
  MOD_RES (18)..(18): Phe-4F
  C-term NH2
AWIAAALRALGDAFNAAFA

SEQ ID NO: 1781 - protein, 19 aa, Artificial Sequence
  Description of Artificial Sequence: Synthetic peptide
  N-term Ac
  MOD_RES (9)..(9): Alpha-Me R8-octenyl-alanine olefin amino acid connected by an all-carbon crosslinker comprising one double bond
  MISC_FEATURE (9)..(16): Crosslink between residues
  MOD_RES (10)..(10): hLeu
  MOD_RES (16)..(16): Alpha-Me S5-pentenyl-alanine olefin amino acid connected by an all-carbon crosslinker comprising one double bond
  MOD_RES (17)..(17): Phe-4F
  MOD_RES (18)..(18): Phe-4F
  C-term NH2
IWIAQAARALGDAFNAFFA

SEQ ID NO: 1782 - protein, 19 aa, Artificial Sequence
  Description of Artificial Sequence: Synthetic peptide
  N-term Ac
  MOD_RES (2)..(2): Alpha-Me R8-octenyl-alanine olefin amino acid connected by an all-carbon crosslinker comprising one double bond
  MISC_FEATURE (2)..(9): Crosslink between residues
  MOD_RES (9)..(9): Two pentenyl-alanine olefin side chains, each of which is crosslinked to another amino acid as indicated
  MISC_FEATURE (9)..(16): Crosslink between residues
  MOD_RES (16)..(16): Alpha-Me S8-octenyl-alanine olefin amino acid connected by an all-carbon crosslinker comprising one double bond
  C-term NH2
IAIAQALRAIGDEFNAYYA

SEQ ID NO: 1783 - protein, 19 aa, Artificial Sequence
  Description of Artificial Sequence: Synthetic peptide
  N-term Ac
  MOD_RES (5)..(5): Alpha-Me S5-pentenyl-alanine olefin amino acid connected by an all-carbon crosslinker comprising one double bond
  MISC_FEATURE (5)..(9): Crosslink between residues
  MOD_RES (9)..(9): Two pentenyl-alanine olefin side chains, each of which is crosslinked to another amino acid as indicated
  MISC_FEATURE (9)..(16): Crosslink between residues
  MOD_RES (16)..(16): Alpha-Me S8-octenyl-alanine olefin amino acid connected by an all-carbon crosslinker comprising one double bond
  C-term NH2
IWIAAALRAIGDEFNAYYA

SEQ ID NO: 1784 - protein, 21 aa, Artificial Sequence
  Description of Artificial Sequence: Synthetic peptide
  N-term Ac
  MOD_RES (9)..(9): Alpha-Me R8-octenyl-alanine olefin amino acid connected by an all-carbon crosslinker comprising one double bond
  MISC_FEATURE (9)..(16): Crosslink between residues
  MOD_RES (16)..(16): Two pentenyl-alanine olefin side chains, each of which is crosslinked to another amino acid as indicated
  MISC_FEATURE (16)..(20): Crosslink between residues
  MOD_RES (20)..(20): Alpha-Me R5-pentenyl-alanine olefin amino acid connected by an all-carbon crosslinker comprising one double bond
  C-term NH2
IWIAQALRAIGDEFNAYYAAA

SEQ ID NO: 1785 - protein, 2010 aa, Artificial Sequence
  Description of Artificial Sequence: Synthetic polypeptide
  MOD_RES (1)..(1001): Any amino acid
  MISC_FEATURE (1)..(1000): This region may encompass 1-1000 residues
  MISC_FEATURE (1001)..(1008): Crosslink between residues
  MOD_RES (1008)..(2010): Any amino acid
  MISC_FEATURE (1009)..(2010): This region may encompass 1-1000 residues
XXXXXXXXXXXXXXXXXXXXXXXXXXXXXXXXXXXXXXXXXXXXXXXXXXXXXXXXXXXXXXXXXXXXXXXXXXXXXXXXXXXXXXXXXXXXXXXXXXXXXXXXXXXXXXXXXXXXXXXXXXXXXXXXXXXXXXXXXXXXXXXXXXXXXXXXXXXXXXXXXXXXXXXXXXXXXXXXXXXXXXXXXXXXXXXXXXXXXXXXXXXXXXXXXXXXXXXXXXXXXXXXXXXXXXXXXXXXXXXXXXXXXXXXXXXXXXXXXXXXXXXXXXXXXXXXXXXXXXXXXXXXXXXXXXXXXXXXXXXXXXXXXXXXXXXXXXXXXXXXXXXXXXXXXXXXXXXXXXXXXXXXXXXXXXXXXXXXXXXXXXXXXXXXXXXXXXXXXXXXXXXXXXXXXXXXXXXXXXXXXXXXXXXXXXXXXXXXXXXXXXXXXXXXXXXXXXXXXXXXXXXXXXXXXXXXXXXXXXXXXXXXXXXXXXXXXXXXXXXXXXXXXXXXXXXXXXXXXXXXXXXXXXXXXXXXXXXXXXXXXXXXXXXXXXXXXXXXXXXXXXXXXXXXXXXXXXXXXXXXXXXXXXXXXXXXXXXXXXXXXXXXXXXXXXXXXXXXXXXXXXXXXXXXXXXXXXXXXXXXXXXXXXXXXXXXXXXXXXXXXXXXXXXXXXXXXXXXXXXXXXXXXXXXXXXXXXXXXXXXXXXXXXXXXXXXXXXXXXXXXXXXXXXXXXXXXXXXXXXXXXXXXXXXXXXXXXXXXXXXXXXXXXXXXXXXXXXXXXXXXXXXXXXXXXXXXXXXXXXXXXXXXXXXXXXXXXXXXXXXXXXXXXXXXXXXXXXXXXXXXXXXXXXXXXXXXXXXXXXXXXXXXXXXXXXXXXXXXXXXXXXXXXXXXXXXXXXXXXXXXXXXXXXXXXXXXXXXXXXXXXXXXXXXXXXXXXXXXXXXXXXXXXXXXXXXXXXXXXXXXXXXXXXXXXXXXXXXXXXXXXXXXXXXXXXXXXXXXXXXXXXXXXXXXXXXXXXXXXXXXIGDAFNXXXXXXXXXXXXXXXXXXXXXXXXXXXXXXXXXXXXXXXXXXXXXXXXXXXXXXXXXXXXXXXXXXXXXXXXXXXXXXXXXXXXXXXXXXXXXXXXXXXXXXXXXXXXXXXXXXXXXXXXXXXXXXXXXXXXXXXXXXXXXXXXXXXXXXXXXXXXXXXXXXXXXXXXXXXXXXXXXXXXXXXXXXXXXXXXXXXXXXXXXXXXXXXXXXXXXXXXXXXXXXXXXXXXXXXXXXXXXXXXXXXXXXXXXXXXXXXXXXXXXXXXXXXXXXXXXXXXXXXXXXXXXXXXXXXXXXXXXXXXXXXXXXXXXXXXXXXXXXXXXXXXXXXXXXXXXXXXXXXXXXXXXXXXXXXXXXXXXXXXXXXXXXXXXXXXXXXXXXXXXXXXXXXXXXXXXXXXXXXXXXXXXXXXXXXXXXXXXXXXXXXXXXXXXXXXXXXXXXXXXXXXXXXXXXXXXXXXXXXXXXXXXXXXXXXXXXXXXXXXXXXXXXXXXXXXXXXXXXXXXXXXXXXXXXXXXXXXXXXXXXXXXXXXXXXXXXXXXXXXXXXXXXXXXXXXXXXXXXXXXXXXXXXXXXXXXXXXXXXXXXXXXXXXXXXXXXXXXXXXXXXXXXXXXXXXXXXXXXXXXXXXXXXXXXXXXXXXXXXXXXXXXXXXXXXXXXXXXXXXXXXXXXXXXXXXXXXXXXXXXXXXXXXXXXXXXXXXXXXXXXXXXXXXXXXXXXXXXXXXXXXXXXXXXXXXXXXXXXXXXXXXXXXXXXXXXXXXXXXXXXXXXXXXXXXXXXXXXXXXXXXXXXXXXXXXXXXXXXXXXXXXXXXXXXXXXXXXXXXXXXXXXXXXXXXXXXXXXXXXXXXXXXXXXXXXXXXXXXXXXXXXXXXXXXXXXXXXXXXXXXXXXXXXXXXXXXXXXXXXXXXXXXXXXXXXXXXXXXXXXXXXXXXXXXXXXXXXXXXXXXXXXXXXXXXXXXXXXXXXXXXXXXXXXXXXXXXXXXXXXXXXXXXXXXXXXXXXXXXXXXX
